(19) United States
(12) Patent Application Publication
(10) Pub. No.: US 2022/0290164 A1
(43) Pub. Date: Sep. 15, 2022

(54) RECOMBINANT RABIES VIRUSES FOR GENE THERAPY

(71) Applicant: BEAM THERAPEUTICS INC,, Cambridge, MA (US)

(72) Inventors: Fei Ran, Cambridge, MA (US); ChieYu Lin, Cambridge, MA (US)

(21) Appl. No.: 17/651,738

(22) Filed: Feb. 18, 2022

Related U.S. Application Data
(60) Provisional application No. 63/241,989, filed on Sep. 8, 2021.
(60) Provisional application No. 63/151,542, filed on Feb. 19, 2021.

(51) Int. Cl. C12N 15/66; C12N 9/78; C12N 9/22; C12N 15/90; A61K 31/7088

(52) U.S. Cl. CPC C12N 15/66; C12N 9/78; C12N 9/22; C12Y 305/04004; C12Y 305/04005; C12N 15/90; A61K 31/7088; C12N 2310/20; C07K 2319/81; C07K 2319/09

(57) ABSTRACT

Provided herein are recombinant rabies virus genomes and recombinant rabies viruses and methods for their use in delivering a transgene into a target cell. Also provided are packaging systems and methods of using the packaging systems to produce recombinant rabies viruses.

### RELATED APPLICATIONS

[0001] This application claims the benefit of U.S. Provisional Patent Application Ser. No. 63/151,542, filed Feb. 19, 2021, and U.S. Provisional Patent Application Ser. No. 63/241,989, filed Sep. 8, 2021, the entire disclosures of which are hereby incorporated herein by reference.

### SEQUENCE LISTING

[0002] The instant application contains a Sequence Listing which has been submitted electronically in ASCII format and is hereby incorporated by reference in its entirety. Said ASCII copy, created on May 31, 2022, is named 725423_BEAM9-002_SL.txt and is 1,908,736 bytes in size.

### BACKGROUND

[0003] Gene therapies largely involve the use of viral gene delivery systems in order to transduce a cell of interest and express a transgene. Viral systems that are commonly used for gene therapy are derived from viruses and suffer from significant disadvantages. The challenges in using current viral systems include: limited, small packaging capacities; unintended resultant consequences such as genomic integration; limited tissue tropism; pre-existing immunity and/or immune responses in the target population, limited ability for re-dosing; and limited durability due to genome instability, immune clearance, and cellular toxicity. For example, while adenoviral vector-mediated gene therapy demonstrates high transduction efficiency and can be used to infect many different cell types, certain disadvantages include non-integration and high immunogenicity. Disadvantages of adeno-associated viral vector-mediated gene therapy include high immunogenicity, and limited packaging capacity. As another example, retroviral vector-mediated gene therapy suffers from low transduction efficiency and the inactivation by complement.

[0004] Accordingly, there is a need for novel viral gene delivery systems that are advantages over current viral systems.

### SUMMARY

[0005] Provided herein are recombinant viral vectors and recombinant viruses derived from the rabies virus, which can be used to transduce a target cell and express a transgene therein. The recombinant rabies vectors and viruses provided by the present disclosure find use as effective viral gene delivery systems. Also provided are viral packaging systems and methods of producing the recombinant viruses described herein.

[0006] In one aspect, a recombinant rabies virus genome, comprising a nucleic acid encoding a therapeutic transgene, wherein: the genome lacks a G gene encoding for a rabies virus glycoprotein or a functional variant thereof; and/or the genome lacks an L gene encoding for a rabies virus polymerase or a functional variant thereof, is provided.

[0007] In certain exemplary embodiments, the genome lacks a G gene encoding for a rabies virus glycoprotein or a functional variant thereof. In certain exemplary embodiments, the genome lacks a G gene encoding for a rabies virus glycoprotein or a functional variant thereof, and wherein the genome lacks an L gene encoding for a rabies virus polymerase or a functional variant thereof.

[0008] In certain exemplary embodiments, the genome comprises: an N gene encoding for a rabies virus nucleoprotein or a functional variant thereof; a P gene encoding for a rabies virus phosphoprotein or a functional variant thereof; and an M gene encoding for a rabies virus matrix protein or a functional variant thereof.

[0009] In another aspect, a recombinant rabies virus particle, comprising a rabies virus glycoprotein and a recombinant rabies virus genome as described herein, is provided.

[0010] In another aspect, a recombinant rabies virus particle, comprising: a rabies virus glycoprotein; and a recombinant rabies virus genome comprising a nucleic acid encoding a therapeutic transgene, wherein: the genome lacks a G gene encoding for a rabies virus glycoprotein or a functional variant thereof; and/or the genome lacks an L gene encoding for a rabies virus polymerase or a functional variant thereof, is provided.

[0011] In certain exemplary embodiments, the genome lacks a G gene encoding for a rabies virus glycoprotein or a functional variant thereof. In certain exemplary embodiments, the genome lacks a G gene encoding for a rabies virus glycoprotein or a functional variant thereof, and wherein the genome lacks an L gene encoding for a rabies virus polymerase or a functional variant thereof.

[0012] In certain exemplary embodiments, the genome lacks:

[0013] a G gene encoding for a rabies virus glycoprotein or a functional variant thereof;

[0014] an L gene encoding for a rabies virus polymerase or a functional variant thereof; and

[0015] an M gene encoding for a rabies virus matrix protein or a functional variant thereof.

[0016] In certain exemplary embodiments, the genome lacks:

[0017] a G gene encoding for a rabies virus glycoprotein or a functional variant thereof;

[0018] an L gene encoding for a rabies virus polymerase or a functional variant thereof;

[0019] an M gene encoding for a rabies virus matrix protein or a functional variant thereof; and

[0020] a P gene encoding for a rabies virus phosphoprotein or a functional variant thereof.

[0021] In certain exemplary embodiments, the genome lacks:

[0022] a G gene encoding for a rabies virus glycoprotein or a functional variant thereof;

[0023] an L gene encoding for a rabies virus polymerase or a functional variant thereof;

[0024] an M gene encoding for a rabies virus matrix protein or a functional variant thereof;

[0025] a P gene encoding for a rabies virus phosphoprotein or a functional variant thereof; and

[0026] an N gene encoding for a rabies virus nucleoprotein or a functional variant thereof.

[0027] In certain exemplary embodiments, the genome only encodes a therapeutic transgene.

[0028] In certain exemplary embodiments, the genome comprises: an N gene encoding for a rabies virus nucleoprotein or a functional variant thereof; a P gene encoding for a rabies virus phosphoprotein or a functional variant thereof; and an M gene encoding for a rabies virus matrix protein or a functional variant thereof.

[0029] In other exemplary embodiments, the genome lacks: an N gene encoding for a rabies virus nucleoprotein or a functional variant thereof; a P gene encoding for a rabies virus phosphoprotein or a functional variant thereof; and/or an M gene encoding for a rabies virus matrix protein or a functional variant thereof.

[0030] In certain exemplary embodiments, the recombinant rabies virus is replication incompetent. In other exemplary embodiments, the recombinant rabies virus is replication deficient.

[0031] In certain exemplary embodiments, each of the genes are operably linked to a transcriptional regulatory element. In certain exemplary embodiments, the transcriptional regulatory element comprises a transcription initiation signal. In certain exemplary embodiments, the transcription initiation signal is exogenous to the rabies virus. In certain exemplary embodiments, the transcription initiation signal is endogenous to the rabies virus.

[0032] In certain exemplary embodiments, each of the genes are operably linked to a transcription termination polyadenylation signal.

[0033] In certain exemplary embodiments, the therapeutic transgene comprises a sequence that encodes a nucleic acid editing system or a component thereof. In certain exemplary embodiments, the nucleic acid editing system comprises a Clustered Regulatory Interspaced Short Palindromic Repeat (CRISPR) system, a zinc finger nuclease (ZFN), a meganuclease, and a Transcription Activator-Like Effector-based Nucleases (TALEN). In certain exemplary embodiments, the nucleic acid editing system comprises a CRISPR system. In certain exemplary embodiments, the CRISPR-system comprises a nucleobase editor comprising a polynucleotide programmable nucleotide binding domain and a nucleobase editing domain.

[0034] In certain exemplary embodiments, the nucleobase editing domain is an adenosine deaminase, cytidine deaminase, or a functional variant thereof. In certain exemplary embodiments, the nucleobase editing domain is an adenosine deaminase. In certain exemplary embodiments the adenosine deaminase comprises a TadA deaminase from any of the adenosine base editors recited in Table 10, Table 11, Table 12, Table 13, Table 14, or Table 15.

[0035] In certain exemplary embodiments the nucleobase editing domain comprises a adenosine deaminase from any one of the adenosine base editors of: ABE 0.1, ABE 0.2, ABE 1.1, ABE 1.2, ABE2.1, ABE2.2, ABE2.3, ABE2.4, ABE2.5, ABE2.6, ABE2.7, ABE2.8, ABE2.9, ABE2.10, ABE2.11, ABE2.12, ABE3.1, ABE3.2, ABE3.3, ABE3.4, ABE3.5, ABE3.6, ABE3.7, ABE3.8, ABE4.1, ABE4.2, ABE4.3, ABE5.1, ABE5.2, ABE5.3, ABE5.4, ABE5.5, ABE5.6, ABE5.7, ABE5.8, ABE5.9, ABE5.10, ABE5.11, ABE5.12, ABE5.13, ABE5.14, ABE6.1, ABE6.2, ABE6.3, ABE6.4, ABE6.5, ABE6.6, ABE7.1, ABE7.2, ABE7.3, ABE7.4, ABE7.5, ABE7.6, ABE7.7, ABE7.8, ABE 7.9, ABE7.10, ABE8.1-m, ABE8.2-m, ABE8.3-m, ABE8.4-m, ABE8.5-m, ABE8.6-m, ABE8.7-m, ABE8.8-m, ABE8.9-m, ABE8.10-m, ABE8.11-m, ABE8.12-m, ABE8.13-m, ABE8.14-m, ABE8.15-m, ABE8.16-m, ABE8.17-m, ABE8.18-m, ABE8.19-m, ABE8.20-m, ABE8.21-m, ABE8.22-m, ABE8.23-m, ABE8.24-m, ABE8.1-d, ABE8.2-d, ABE8.3-d, ABE8.4-d, ABE8.5-d, ABE8.6-d, ABE8.7-d, ABE8.8-d, ABE8.9-d, ABE8.10-d, ABE8.11-d, ABE8.12-d, ABE8.13-d, ABE8.14-d, ABE8.15-d, ABE8.16-d, ABE8.17-d, ABE8.18-d, ABE8.19-d, ABE8.20-d, ABE8.21-d, ABE8.22-d, ABE8.23-d, ABE8.24-d, ABE8a-m, ABE8b-m, ABE8c-m, ABE8d-m, ABE8e-m, ABE8a-d, ABE8b-d, ABE8c-d, ABE8d-d, ABE8e-d, ABE9.1, ABE9.2, ABE9.3, ABE9.4, ABE9.5, ABE9.6, ABE9.7, ABE9.8, ABE9.9, ABE9.10, ABE9.11, ABE9.12, ABE9.13, ABE9.14, ABE9.15, ABE9.16, ABE9.17, ABE9.18, ABE9.19, ABE9.2, ABE9.21, ABE9.22, ABE9.23, ABE9.24, ABE9.25, ABE9.26, ABE9.27, ABE9.28, ABE9.29, ABE9.30, ABE9.31, ABE9.32, ABE9.33, ABE9.34, ABE9.35, ABE9.36, ABE9.37, ABE9.38, ABE9.39, ABE9.40, ABE9.41, ABE9.42, ABE9.43, ABE9.44, ABE9.45, ABE9.46, ABE9.47, ABE9.48, ABE9.49, ABE9.50, ABE9.51, ABE9.52, ABE9.53, ABE9.54, ABE9.55, ABE9.56, ABE9.57, and ABE9.58.

[0036] In certain exemplary embodiments the nucleobase editing domain comprises a adenosine base editor selected from the group consisting of: ABE 0.1, ABE 0.2, ABE 1.1, ABE 1.2, ABE2.1, ABE2.2, ABE2.3, ABE2.4, ABE2.5, ABE2.6, ABE2.7, ABE2.8, ABE2.9, ABE2.10, ABE2.11, ABE2.12, ABE3.1, ABE3.2, ABE3.3, ABE3.4, ABE3.5, ABE3.6, ABE3.7, ABE3.8, ABE4.1, ABE4.2, ABE4.3, ABE5.1, ABE5.2, ABE5.3, ABE5.4, ABE5.5, ABE5.6, ABE5.7, ABE5.8, ABE5.9, ABE5.10, ABE5.11, ABE5.12, ABE5.13, ABE5.14, ABE6.1, ABE6.2, ABE6.3, ABE6.4, ABE6.5, ABE6.6, ABE7.1, ABE7.2, ABE7.3, ABE7.4, ABE7.5, ABE7.6, ABE7.7, ABE7.8, ABE 7.9, ABE7.10, ABE8.1-m, ABE8.2-m, ABE8.3-m, ABE8.4-m, ABE8.5-m, ABE8.6-m, ABE8.7-m, ABE8.8-m, ABE8.9-m, ABE8.10-m, ABE8.11-m, ABE8.12-m, ABE8.13-m, ABE8.14-m, ABE8.15-m, ABE8.16-m, ABE8.17-m, ABE8.18-m, ABE8.19-m, ABE8.20-m, ABE8.21-m, ABE8.22-m, ABE8.23-m, ABE8.24-m, ABE8.1-d, ABE8.2-d, ABE8.3-d, ABE8.4-d, ABE8.5-d, ABE8.6-d, ABE8.7-d, ABE8.8-d, ABE8.9-d, ABE8.10-d, ABE8.11-d, ABE8.12-d, ABE8.13-d, ABE8.14-d, ABE8.15-d, ABE8.16-d, ABE8.17-d, ABE8.18-d, ABE8.19-d, ABE8.20-d, ABE8.21-d, ABE8.22-d, ABE8.23-d, ABE8.24-d, ABE8a-m, ABE8b-m, ABE8c-m, ABE8d-m, ABE8e-m, ABE8a-d, ABE8b-d, ABE8c-d, ABE8d-d, ABE8e-d, ABE9.1, ABE9.2, ABE9.3, ABE9.4, ABE9.5, ABE9.6, ABE9.7, ABE9.8, ABE9.9, ABE9.10, ABE9.11, ABE9.12, ABE9.13, ABE9.14, ABE9.15, ABE9.16, ABE9.17, ABE9.18, ABE9.19, ABE9.2, ABE9.21, ABE9.22, ABE9.23, ABE9.24, ABE9.25, ABE9.26, ABE9.27, ABE9.28, ABE9.29, ABE9.30, ABE9.31, ABE9.32, ABE9.33, ABE9.34, ABE9.35, ABE9.36, ABE9.37, ABE9.38, ABE9.39, ABE9.40, ABE9.41, ABE9.42, ABE9.43, ABE9.44, ABE9.45, ABE9.46, ABE9.47, ABE9.48, ABE9.49, ABE9.50, ABE9.51, ABE9.52, ABE9.53, ABE9.54, ABE9.55, ABE9.56, ABE9.57, and ABE9.58. In certain exemplary embodiments, the adenosine deaminase is ABE7.10 or ABE8.20.

[0037] In certain exemplary embodiments the nucleobase editing domain comprises a cytidine deaminase. In certain exemplary embodiments the cytidine deaminase is selected from the group consisting of: Petromyzon marinus cytosine deaminase 1 (PmCDA1), Activation-induced cytidine deaminase (AID), and APOBEC.

[0038] In certain exemplary embodiments, the polynucleotide programmable nucleotide binding domain comprises a Cas9 polypeptide, a Cas12 polypeptide, or a functional variant thereof.

[0039] In certain exemplary embodiments, the CRISPR-system further comprises a guide RNA (gRNA) or a nucleic acid sequence encoding a gRNA.

[0040] In certain exemplary embodiments, the therapeutic transgene comprises a sequence encoding a uracil glycosylase inhibitor (UGI).

[0041] In certain exemplary embodiments, the therapeutic transgene comprises a sequence encoding a nuclear localization signal (NLS).

[0042] In certain exemplary embodiments, the polynucleotide programmable nucleotide binding domain and/or the nucleobase editing domain further comprises a nuclear localization signal (NLS).

[0043] In certain exemplary embodiments, the cytidine deaminase further comprises a uracil glycosylase inhibitor (UGI).

[0044] In certain exemplary embodiments, the therapeutic transgene comprises a therapeutic polypeptide and/or a therapeutic nucleic acid. In certain exemplary embodiments, the therapeutic polypeptide and/or therapeutic nucleic acid is secreted from a cell.

[0045] In certain exemplary embodiments, the nucleic acid encoding the therapeutic transgene is greater than: about 300 bp, about 400 bp, about 500 bp, about 600 bp, about 700 bp, about 800 bp, about 900 bp, about 1,000 bp, about 1,100 bp, about 1,200 bp, about 1,300 bp, about 1,400 bp, about 1,500 bp, about 1,600 bp, about 1,700 bp, about 1,800 bp, about 1,900 bp, about 2,000 bp, about 2,100 bp, about 2,200 bp, about 2,300 bp, about 2,400 bp, about 2,500 bp, about 2,600 bp, about 2,700 bp, about 2,800 bp, about 2,900 bp, or about 3,000 bp. In certain exemplary embodiments, the nucleic acid encoding the therapeutic transgene is greater than about 300 bp. In certain exemplary embodiments, the nucleic acid encoding the therapeutic transgene is greater than about 650 bp. In certain exemplary embodiments, the nucleic acid encoding the therapeutic transgene is greater than about 1,000 bp. In certain exemplary embodiments, the nucleic acid encoding the therapeutic transgene is greater than about 3,000 bp. In certain exemplary embodiments, the nucleic acid encoding the therapeutic transgene is greater than about 4,500 bp. In certain exemplary embodiments, the nucleic acid encoding the therapeutic transgene is greater than about 8,500 bp. In certain exemplary embodiments, the nucleic acid encoding the therapeutic transgene is greater than about 10,000 bp.

[0046] In certain exemplary embodiments, the therapeutic transgene is operably linked to a transcriptional regulatory element. In certain exemplary embodiments, the transcriptional regulatory element comprises a transcription initiation signal. In certain exemplary embodiments, the transcription initiation signal is exogenous to the rabies virus. In certain exemplary embodiments, the transcription initiation signal is endogenous to the rabies virus.

[0047] In certain exemplary embodiments, the therapeutic transgene is operably linked to a transcription termination polyadenylation signal.

[0048] In another aspect, a pharmaceutical composition comprising a recombinant virus particle as described herein, is provided.

[0049] In another aspect, a method for expressing a therapeutic transgene in a target cell, comprising transducing a target cell with a recombinant virus particle as described herein, is provided.

[0050] In another aspect, a method for expressing a nucleobase editor in a target cell, comprising transducing a target cell with a recombinant rabies virus particle, wherein the recombinant virus particle comprises: a rabies virus glycoprotein; and a recombinant rabies virus genome comprising a nucleic acid encoding a nucleobase editor comprising a polynucleotide programmable nucleotide binding domain and a nucleobase editing domain, wherein: the genome lacks a G gene encoding for a rabies virus glycoprotein or a functional variant thereof; and/or the genome lacks an L gene encoding for a rabies virus polymerase or a functional variant thereof, is provided.

[0051] In certain exemplary embodiments, the genome further lacks:

[0052] an M gene encoding for a rabies virus matrix protein or a functional variant thereof.

[0053] In certain exemplary embodiments, the genome further lacks:

[0054] an M gene encoding for a rabies virus matrix protein or a functional variant thereof; and

[0055] a P gene encoding for a rabies virus phosphoprotein or a functional variant thereof.

[0056] In certain exemplary embodiments, the genome further lacks:

[0057] an M gene encoding for a rabies virus matrix protein or a functional variant thereof;

[0058] a P gene encoding for a rabies virus phosphoprotein or a functional variant thereof; and

[0059] an N gene encoding for a rabies virus nucleoprotein or a functional variant thereof.

[0060] In certain exemplary embodiments, the genome only encodes a nucleobase editor.

[0061] In certain exemplary embodiments, the genome comprises: an N gene encoding for a rabies virus nucleoprotein or a functional variant thereof; a P gene encoding for a rabies virus phosphoprotein or a functional variant thereof; and an M gene encoding for a rabies virus matrix protein or a functional variant thereof.

[0062] In certain exemplary embodiments, each of the genes are operably linked to a transcriptional regulatory element. In certain exemplary embodiments, the transcriptional regulatory element comprises a transcription initiation signal. In certain exemplary embodiments, the transcription initiation signal is exogenous to the rabies virus. In certain exemplary embodiments, the transcription initiation signal is endogenous to the rabies virus.

[0063] In certain exemplary embodiments, each of the genes are operably linked to a transcription termination polyadenylation signal.

[0064] In certain exemplary embodiments, the nucleobase editing domain comprises an adenosine deaminase, cytidine deaminase, or a functional variant thereof.

[0065] In certain exemplary embodiments, the nucleobase editing domain comprises an adenosine deaminase. In certain exemplary embodiments, the adenosine deaminase comprises a TadA deaminase from any of the adenosine base editors recited in Table 10, Table 11, Table 12, Table 13, Table 14, or Table 15.

[0066] In certain exemplary embodiments, the nucleobase editing domain comprises a adenosine deaminase from any one of the adenosine base editors of: ABE 0.1, ABE 0.2, ABE 1.1, ABE 1.2, ABE2.1, ABE2.2, ABE2.3, ABE2.4, ABE2.5, ABE2.6, ABE2.7, ABE2.8, ABE2.9, ABE2.10, ABE2.11, ABE2.12, ABE3.1, ABE3.2, ABE3.3, ABE3.4, ABE3.5, ABE3.6, ABE3.7, ABE3.8, ABE4.1, ABE4.2, ABE4.3, ABE5.1, ABE5.2, ABE5.3, ABE5.4, ABE5.5, ABE5.6, ABE5.7, ABE5.8, ABE5.9, ABE5.10, ABE5.11, ABE5.12, ABE5.13, ABE5.14, ABE6.1, ABE6.2, ABE6.3, ABE6.4, ABE6.5, ABE6.6, ABE7.1, ABE7.2, ABE7.3, ABE7.4, ABE7.5, ABE7.6, ABE7.7, ABE7.8, ABE 7.9, ABE7.10, ABE8.1-m, ABE8.2-m, ABE8.3-m, ABE8.4-m, ABE8.5-m, ABE8.6-m, ABE8.7-m, ABE8.8-m, ABE8.9-m, ABE8.10-m, ABE8.11-m, ABE8.12-m, ABE8.13-m, ABE8.14-m, ABE8.15-m, ABE8.16-m, ABE8.17-m, ABE8.18-m, ABE8.19-m, ABE8.20-m, ABE8.21-m, ABE8.22-m, ABE8.23-m, ABE8.24-m, ABE8.1-d, ABE8.2-d, ABE8.3-d, ABE8.4-d, ABE8.5-d, ABE8.6-d, ABE8.7-d, ABE8.8-d, ABE8.9-d, ABE8.10-d, ABE8.11-d, ABE8.12-d, ABE8.13-d, ABE8.14-d, ABE8.15-d, ABE8.16-d, ABE8.17-d, ABE8.18-d, ABE8.19-d, ABE8.20-d, ABE8.21-d, ABE8.22-d, ABE8.23-d, ABE8.24-d, ABE8a-m, ABE8b-m, ABE8c-m, ABE8d-m, ABE8e-m, ABE8a-d, ABE8b-d, ABE8c-d, ABE8d-d, ABE8e-d, ABE9.1, ABE9.2, ABE9.3, ABE9.4, ABE9.5, ABE9.6, ABE9.7, ABE9.8, ABE9.9, ABE9.10, ABE9.11, ABE9.12, ABE9.13, ABE9.14, ABE9.15, ABE9.16, ABE9.17, ABE9.18, ABE9.19, ABE9.2, ABE9.21, ABE9.22, ABE9.23, ABE9.24, ABE9.25, ABE9.26, ABE9.27, ABE9.28, ABE9.29, ABE9.30, ABE9.31, ABE9.32, ABE9.33, ABE9.34, ABE9.35, ABE9.36, ABE9.37, ABE9.38, ABE9.39, ABE9.40, ABE9.41, ABE9.42, ABE9.43, ABE9.44, ABE9.45, ABE9.46, ABE9.47, ABE9.48, ABE9.49, ABE9.50, ABE9.51, ABE9.52, ABE9.53, ABE9.54, ABE9.55, ABE9.56, ABE9.57, and ABE9.58.

[0067] In certain exemplary embodiments, the nucleobase editing domain comprises a adenosine base editor selected from the group consisting of: ABE 0.1, ABE 0.2, ABE 1.1, ABE 1.2, ABE2.1, ABE2.2, ABE2.3, ABE2.4, ABE2.5, ABE2.6, ABE2.7, ABE2.8, ABE2.9, ABE2.10, ABE2.11, ABE2.12, ABE3.1, ABE3.2, ABE3.3, ABE3.4, ABE3.5, ABE3.6, ABE3.7, ABE3.8, ABE4.1, ABE4.2, ABE4.3, ABE5.1, ABE5.2, ABE5.3, ABE5.4, ABE5.5, ABE5.6, ABE5.7, ABE5.8, ABE5.9, ABE5.10, ABE5.11, ABE5.12, ABE5.13, ABE5.14, ABE6.1, ABE6.2, ABE6.3, ABE6.4, ABE6.5, ABE6.6, ABE7.1, ABE7.2, ABE7.3, ABE7.4, ABE7.5, ABE7.6, ABE7.7, ABE7.8, ABE 7.9, ABE7.10, ABE8.1-m, ABE8.2-m, ABE8.3-m, ABE8.4-m, ABE8.5-m, ABE8.6-m, ABE8.7-m, ABE8.8-m, ABE8.9-m, ABE8.10-m, ABE8.11-m, ABE8.12-m, ABE8.13-m, ABE8.14-m, ABE8.15-m, ABE8.16-m, ABE8.17-m, ABE8.18-m, ABE8.19-m, ABE8.20-m, ABE8.21-m, ABE8.22-m, ABE8.23-m, ABE8.24-m, ABE8.1-d, ABE8.2-d, ABE8.3-d, ABE8.4-d, ABE8.5-d, ABE8.6-d, ABE8.7-d, ABE8.8-d, ABE8.9-d, ABE8.10-d, ABE8.11-d, ABE8.12-d, ABE8.13-d, ABE8.14-d, ABE8.15-d, ABE8.16-d, ABE8.17-d, ABE8.18-d, ABE8.19-d, ABE8.20-d, ABE8.21-d, ABE8.22-d, ABE8.23-d, ABE8.24-d, ABE8a-m, ABE8b-m, ABE8c-m, ABE8d-m, ABE8e-m, ABE8a-d, ABE8b-d, ABE8c-d, ABE8d-d, ABE8e-d, ABE9.1, ABE9.2, ABE9.3, ABE9.4, ABE9.5, ABE9.6, ABE9.7, ABE9.8, ABE9.9, ABE9.10, ABE9.11, ABE9.12, ABE9.13, ABE9.14, ABE9.15, ABE9.16, ABE9.17, ABE9.18, ABE9.19, ABE9.2, ABE9.21, ABE9.22, ABE9.23, ABE9.24, ABE9.25, ABE9.26, ABE9.27, ABE9.28, ABE9.29, ABE9.30, ABE9.31, ABE9.32, ABE9.33, ABE9.34, ABE9.35, ABE9.36, ABE9.37, ABE9.38, ABE9.39, ABE9.40, ABE9.41, ABE9.42, ABE9.43, ABE9.44, ABE9.45, ABE9.46, ABE9.47, ABE9.48, ABE9.49, ABE9.50, ABE9.51, ABE9.52, ABE9.53, ABE9.54, ABE9.55, ABE9.56, ABE9.57, and ABE9.58.

[0068] In certain exemplary embodiments, the nucleobase editing domain comprises a adenosine base editor of ABE7.10 or ABE8.20.

[0069] In certain exemplary embodiments, the nucleobase editing domain is a cytidine deaminase. In certain exemplary embodiments, the cytidine deaminase is selected from the group consisting of: Petromyzon marinus cytosine deaminase 1 (PmCDA1), Activation-induced cytidine deaminase (AID), and APOBEC.

[0070] In certain exemplary embodiments, the polynucleotide programmable nucleotide binding domain comprises a Cas9 polypeptide, a Cas12 polypeptide, or a functional variant thereof.

[0071] In certain exemplary embodiments, the recombinant genome further comprises a guide RNA (gRNA). In certain exemplary embodiments, the guide RNA (gRNA) is provided to the target cell exogenously. In certain exemplary embodiments, the gRNA is capable of targeting a genomic locus of the target cell.

[0072] In certain exemplary embodiments, the target cell is transduced ex vivo. In certain exemplary embodiments, the target cell is a human cell. In certain exemplary embodiments, the target cell is obtained from a human. In certain exemplary embodiments, the target cell is autologous to the human. In certain exemplary embodiments, the target cell is allogeneic to the human.

[0073] In certain exemplary embodiments, the target cell is transduced in vivo. In certain exemplary embodiments, the target cell is a human cell. In certain exemplary embodiments, the target cell is a neuronal cell, an epithelial cell, or a hepatocyte. In certain exemplary embodiments, the target cell is in a human.

[0074] In another aspect, a method for delivering a therapeutic transgene to a subject, comprising administering to the subject a recombinant virus particle as described herein, or a pharmaceutical composition as described herein, is provided.

[0075] In another aspect, a method for delivering a nucleobase editor to a subject, comprising administering to the subject a recombinant rabies virus particle, wherein the recombinant virus particle comprises: a rabies virus glycoprotein; and a recombinant rabies virus genome comprising a nucleic acid encoding a nucleobase editor comprising a polynucleotide programmable nucleotide binding domain and a nucleobase editing domain, wherein: the genome lacks a G gene encoding for a rabies virus glycoprotein or a functional variant thereof;

[0076] and/or the genome lacks an L gene encoding for a rabies virus polymerase or a functional variant thereof, is provided.

[0077] In certain exemplary embodiments, wherein the genome comprises: an N gene encoding for a rabies virus nucleoprotein or a functional variant thereof; a P gene encoding for a rabies virus phosphoprotein or a functional variant thereof; and an M gene encoding for a rabies virus matrix protein or a functional variant thereof.

[0078] In certain exemplary embodiments, wherein the nucleobase editing domain is an adenosine deaminase, cytidine deaminase, or a functional variant thereof. In certain exemplary embodiments, the base editor is an adenosine deaminase. In certain exemplary embodiments, the adenosine deaminase is ABE7.10.

[0079] In certain exemplary embodiments, the polynucleotide programmable nucleotide binding domain comprises a Cas9 polypeptide, a Cas12 polypeptide, or a functional variant thereof.

[0080] In certain exemplary embodiments, the recombinant genome further comprises a nucleic acid sequence encoding a guide RNA (gRNA). In certain exemplary embodiments, the guide RNA (gRNA) is provided to the target cell exogenously. In certain exemplary embodiments, the gRNA is capable of targeting a genomic locus of the target cell.

[0081] In certain exemplary embodiments, the subject is a mammal. In certain exemplary embodiments, the subject is a human.

[0082] In another aspect, a packaging system for the recombinant preparation of a rabies virus particle, wherein the packaging system comprises: an N gene encoding for a rabies virus nucleoprotein or a functional variant thereof; a P gene encoding for a rabies virus phosphoprotein or a functional variant thereof; an L gene encoding for a rabies virus polymerase or a functional variant thereof; and a recombinant rabies virus genome, wherein: the genome lacks a G gene encoding for a rabies virus glycoprotein or a functional variant thereof; and/or the genome lacks an L gene encoding for a rabies virus polymerase or a functional variant thereof, is provided.

[0083] In certain exemplary embodiments, the recombinant rabies virus genome comprises a nucleic acid encoding a transgene or therapeutic transgene.

[0084] In certain exemplary embodiments, the recombinant rabies virus genome is comprised within a virus genome vector.

[0085] In certain exemplary embodiments, the N, P, and L genes are each comprised within a separate vector. In certain exemplary embodiments, each of the N, P, and L genes are operably linked to a transcriptional regulatory element. In certain exemplary embodiments, the transcriptional regulatory element comprises a promoter and/or enhancer. In certain exemplary embodiments, the promoter is a constitutive promoter. In certain exemplary embodiments, the promoter is an elongation factor 1a promoter. In certain exemplary embodiments, the separate vectors are each contained within a separate transfecting plasmid.

[0086] In certain exemplary embodiments, the N, P, and L genes are comprised within a single vector. In certain exemplary embodiments, the single vector comprises a first expression cassette comprising the N and P genes, and a second expression cassette comprising the L gene. In certain exemplary embodiments, the first expression cassette comprises from 5′ to 3′: a transcriptional regulatory element; the P gene; and the N gene. In certain exemplary embodiments, the first expression cassette comprises from 5′ to 3′: a transcriptional regulatory element; the P gene; a ribosomal skipping element; and the N gene. In certain exemplary embodiments, the ribosomal skipping element is an IRES element. In certain exemplary embodiments, the ribosomal skipping element is a 2A element. In certain exemplary embodiments, the second expression cassette comprises from 5′ to 3′: a transcriptional regulatory element; and the L gene. In certain exemplary embodiments, the transcriptional regulatory element comprises a promoter and/or enhancer. In certain exemplary embodiments, the promoter is a constitutive promoter. In certain exemplary embodiments, the promoter is an elongation factor 1α promoter. In certain exemplary embodiments, the first and the second expression cassettes are in opposite orientations in the vector. In certain exemplary embodiments, the single vector is contained within a single transfecting plasmid.

[0087] In certain exemplary embodiments, the packaging system further comprises an M gene encoding for a rabies virus matrix protein or a functional variant thereof. In certain exemplary embodiments, the M gene is comprised within a vector. In certain exemplary embodiments, the M gene is operably linked to a transcriptional regulatory element. In certain exemplary embodiments, the transcriptional regulatory element comprises a promoter and/or enhancer. In certain exemplary embodiments, the vector comprising the M gene is contained within a transfecting plasmid.

[0088] In certain exemplary embodiments, the packaging system further comprises a G gene encoding for a rabies virus glycoprotein or a functional variant thereof. In certain exemplary embodiments, the G gene is comprised within a vector. In certain exemplary embodiments, the G gene is operably linked to a transcriptional regulatory element. In certain exemplary embodiments, the transcriptional regulatory element comprises a promoter and/or enhancer.

[0089] In certain exemplary embodiments, the vector comprising the G gene is contained within a transfecting plasmid.

[0090] In another aspect, a method for producing a recombinant rabies virus particle, the method comprising introducing a packaging system as described herein into a cell under conditions operative for enveloping the recombinant rabies virus genome to form the recombinant rabies virus particle, is provided.

[0091] In certain exemplary embodiments, the introducing is mediated by electroporation, nucleofection, or lipofection.

[0092] In another aspect, a recombinant rabies virus particle packaging cell comprising a packaging system as described herein, is provided.

[0093] In another aspect, a recombinant rabies virus particle packaging cell, comprising: an N gene encoding for a rabies virus nucleoprotein or a functional variant thereof; a P gene encoding for a rabies virus phosphoprotein or a functional variant thereof; and an L gene encoding for a rabies virus polymerase or a functional variant thereof, is provided.

[0094] In certain exemplary embodiments, a first expression cassette comprises the N and P genes. In certain exemplary embodiments, the first expression cassette comprises from 5′ to 3′: a transcriptional regulatory element; the P gene; and the N gene. In certain exemplary embodiments, the first expression cassette comprises from 5′ to 3′: a transcriptional regulatory element; the P gene; a ribosomal skipping element; and the N gene. In certain exemplary embodiments, the ribosomal skipping element is an IRES element. In certain exemplary embodiments, the ribosomal skipping element is a 2A element.

[0095] In certain exemplary embodiments, a second expression cassette comprises the L gene. In certain exemplary embodiments, the second expression cassette comprises from 5′ to 3′: a transcriptional regulatory element; and the L gene. In certain exemplary embodiments, the transcriptional regulatory element comprises a promoter and/or enhancer. In certain exemplary embodiments, the promoter is a constitutive promoter. In certain exemplary embodiments, the promoter is an elongation factor 1α promoter.

[0096] In certain exemplary embodiments, the first and the second expression cassettes are in opposite orientations in the vector.

[0097] In certain exemplary embodiments, the recombinant rabies virus particle packaging cell further comprises an M gene encoding for a rabies virus matrix protein and/or a G gene encoding for a rabies virus glycoprotein. In certain exemplary embodiments, the M gene and/or the G gene are operably linked to a transcriptional regulatory element. In certain exemplary embodiments, the transcriptional regulatory element comprises a promoter and/or enhancer. In certain exemplary embodiments, a third expression and/or fourth cassette comprises the rabies virus G gene and/or rabies virus M gene.

[0098] In certain exemplary embodiments, the packaging cell is of a mammalian, a bacterial, or an insect origin. In certain exemplary embodiments, the packaging cell is selected from the group consisting of a HEK293 cell, a VERO cell, a BHK cell, and a BSR cell.

[0099] In another aspect, a method for producing a recombinant rabies virus, the method comprising introducing into a packaging cell as described herein, a nucleic acid comprising a recombinant rabies virus genome comprising a nucleic acid comprising a therapeutic transgene, under conditions operative for enclosing the recombinant rabies virus genome in the glycoprotein to form the recombinant rabies virus, wherein: the genome lacks an endogenous G gene encoding for a rabies virus glycoprotein; and the genome lacks an endogenous L gene encoding for a rabies virus polymerase, is provided.

[0100] In certain exemplary embodiments, the recombinant genome comprises: an N gene encoding for a rabies virus nucleoprotein or a functional variant thereof; a P gene encoding for a rabies virus phosphoprotein or a functional variant thereof; and an M gene encoding for a rabies virus matrix protein or a functional variant thereof.

[0101] In certain exemplary embodiments, each of the genes are operably linked to a transcriptional regulatory element. In certain exemplary embodiments, the transcriptional regulatory element comprises a transcription initiation signal. In certain exemplary embodiments, the transcription initiation signal is exogenous to the rabies virus. In certain exemplary embodiments, the transcription initiation signal is endogenous to the rabies virus.

[0102] In certain exemplary embodiments, each of the genes are operably linked to a transcription termination polyadenylation signal.

[0103] In certain exemplary embodiments, the recombinant rabies virus titer is greater than about 1E8 TU/mL. In certain exemplary embodiments, the recombinant rabies virus titer is from about 1E8 TU/mL to about 1E9 TU/mL.

[0104] In another aspect, a method of treating a disease or disorder in a subject, the method comprising administering a recombinant rabies virus particle as described herein, or a pharmaceutical composition as described herein to the subject, is provided.

[0105] In certain exemplary embodiments, the disease or disorder is a neurologic disease or disorder. In certain exemplary embodiments, the disease or disorder is an ophthalmic disease or disorder.

[0106] In another aspect, use of a recombinant rabies virus as described herein, or a pharmaceutical composition as described herein, in the manufacture of a medicament for treating a disease or disorder in a subject, is provided.

### BRIEF DESCRIPTION OF THE DRAWINGS

[0107] FIG. 1 is a chart showing relative infectivity on 293T cells from equal volumes of virus-containing supernatant harvested on the indicated days from various stable cell lines.

[0108] FIG. 2A is a schematic depicting the VIR218 replicon.

[0109] FIG. 2B is a schematic depicting the production and infection scheme for recombinant rabies virus particle mediated gene delivery.

[0110] FIG. 2C is a chart depicting that a recombinant rabies virus particle comprising a recombinant rabies virus genome encoding a nucleobase editor can effect gene editing of a target sequence.

[0111] FIG. 3A is a schematic depicting the organization of a recombinant rabies viral genome comprising a gRNA, polynucleotide programmable nucleotide binding domain, and nucleobase editors.

[0112] FIG. 3B is a schematic depicting a gRNA-tRNA expression cassette encoding a gRNA between two tRNA sequences with arrows indicating cleavage sites of the RNA.

[0113] FIG. 3C is a schematic depicting a gRNA-tRNA expression cassette encoding gRNAs (a first gRNA and a second gRNA), wherein the first gRNA is between a first tRNA and a second tRNA, followed by the second gRNA.

[0114] FIG. 3D is a schematic depicting a gRNA-tRNA expression cassette encoding gRNAs (a first gRNA and a second gRNA), wherein the first gRNA is between a first tRNA and a second tRNA, and the second gRNA is between a second tRNA and a third tRNA.

[0115] FIG. 3E is a chart depicting % infection and % A>G base editing in HEK cells transduced with a recombinant rabies virus particle comprising a recombinant rabies virus genome encoding a nucleobase editor and gRNAs encoded between multiple tRNAs. The base editing was measured at a Hek2 site and IEDG site targeted by a Hek2-targeting gRNA and a IEDG-targeting gRNA.

[0116] FIG. 4A is a schematic depicting a ΔG, ΔGL, and ΔALL (i.e., ΔGLNPM) rabies virus replicon encoding a Cre recombinase-2A-GFP reporter gene.

[0117] FIG. 4B depicts flourescent images of cells transfected with rabies virus vectors in a ΔG, ΔGL, or ΔALL (i.e., ΔGLNPM) background, each vector encoding a Cre recombinase-2A-GFP reporter gene. Images were taken 6 days post-transfection under a standard transfection and an optimized transfection as depicted in FIG. 2B.

[0118] FIG. 4C depicts bar graphs representing % viral entry into reporter cells, as measured by GFP flourescence.

[0119] FIG. 5 is a chart depicting percent A to G base editing in 293T cells tranduced with RABV having a RABV genome encoding the ABE 8.20 base editor. A codon-optimized version of the RABV SAD B19 ΔG virus, referred to as SynV, was used as the RABV genome. The base editor gene replaced the G gene in the RABV genome. U6-driven guide RNAs (gRNAs), targeting HEK2 and ABCA4 loci, were transfected in trans into target cells at the time of infection. Multiplicity of infection (MOI) based on functional viral titers is indicated.

[0120] FIG. 6 depicts two charts depicting percent C to T base editing in 293T cells tranduced with RABV having a RABV genome encoding one of several different base editors. The SynV RABV genome was used. The base editor gene replaced the G gene in the RABV genome. U6-driven gRNAs, targeting HEK2 (top chart) and ABCA4 (bottom chart) loci, were transfected in trans into target cells at the time of infection. MOI based on functional viral titers is indicated.

[0121] FIG. 7 depicts two charts depicting percent A to G base editing in 293T cells tranduced with RABV having a RABV genome encoding the ABE7.10 base. A SAD B19 ΔGL RABV genome was used to encode the base editor, where the base editor replaced the G protein within the RABV genome. One set of cells was additionally transfected by a plasmid encoding RABV L protein (virus+L). U6-driven gRNAs, targeting HEK2 and ABCA4 loci, were transfected in trans into target cells at the time of infection. MOI based on functional viral titers is indicated.

[0122] FIG. 8 depicts flourescent images of cells transfected with rabies virus vectors in a ΔN, ΔP, ΔM, and ΔL background, each vector encoding a Cre recombinase-2A-GFP reporter gene. Either 293T cells or CE1.30 cells were transfected, with and without complementation of the missing gene. Images were taken 4 days post-insfection.

[0123] FIG. 9 depicts bar graphs representing % viral entry into reporter cells (293T or CE1.30), as measured by GFP flourescence. Supernantant from the cells transfected in FIG. 8 were used.

[0124] FIG. 10 depicts graphs representing % viral entry into CE1.30 cells, as measured by GFP and mScarlet flourescence. ΔGL, ΔMGL, ΔPMGL, and ΔALL rabies virus replicons encoding Cre-2a-GFP as a transgene were grown in CE1.30 cells, and titered on reporter cells to show functional delivery of both Cre and GFP mRNA.

[0125] FIG. 11 depicts flourescent images of cells transfected with rabies virus vectors in a ΔGL, ΔMGL, ΔPMGL, and ΔALL background, each vector encoding a Cre recombinase-2A-GFP reporter gene. Either 293T cells or CE1.30 cells were transfected. Images were taken 3 days post-insfection.

[0126] FIG. 12 depicts schmeatics of expression vectors used to express RABV genes. Vector VIR069 contains a first expression cassette, from 5′ to 3′, of an EF1α promoter, the RABV N gene, a 2a ribosomal skipping element, the RABV P gene, a 2a ribosomal skipping element, and the RABV M gene. VIR069 contains a second expression cassette in the reverse orientation to the first expression cassette, from 5′ to 3′, of an RPBSA promoter and a BFP-zeocin selection marker gene. Vector VIR071 contains a first expression cassette, from 5′ to 3′, of an EF1α promoter, the RABV N gene, an IRES, the RABV P gene, a 2a ribosomal skipping element, and the RABV M gene. VIR071 contains a second expression cassette in the reverse orientation to the first expression cassette, from 5′ to 3′, of an RPBSA promoter, the RABV L gene, a 2a ribosomal skipping element, and a zeocin selection marker gene. Vector VIR112 contains a first expression cassette, from 5′ to 3′, of an EF1α promoter, the RABV N gene, an IRES, the RABV P gene, an IRES, and the RABV M gene. VIR071 contains a second expression cassette in the reverse orientation to the first expression cassette, from 5′ to 3′, of an RPBSA promoter, the RABV L gene, a 2a ribosomal skipping element, and a zeocin selection marker gene.

### DETAILED DESCRIPTION

[0127] Provided herein is a recombinant rabies virus genome that comprises a nucleic acid comprising a transgene (e.g., a therapeutic transgene). In certain embodiments, the recombinant rabies virus genome lacks an endogenous G gene encoding for a rabies virus glycoprotein, and lacks an endogenous L gene encoding for a rabies virus polymerase. Also provided are methods for producing the recombinant rabies virus particles. Such methods generally comprise introducing a packaging system described herein into a suitable packaging cell.

[0128] It is to be understood that the methods described herein are not limited to particular methods and experimental conditions disclosed herein as such methods and conditions may vary. It is also to be understood that the terminology used herein is for the purpose of describing particular embodiments only, and is not intended to be limiting. The methods described herein use conventional molecular and cellular biological and immunological techniques that are well within the skill of the ordinary artisan. Such techniques are well known to the skilled artisan and are explained in the scientific literature.

### A. DEFINITIONS

[0129] Unless defined otherwise, all technical and scientific terms used herein have the meaning commonly understood by a person skilled in the art to which this invention belongs. The following references provide one of skill with a general definition of many of the terms used in this invention: Singleton et al., Dictionary of Microbiology and Molecular Biology (2nd ed. 1994); The Cambridge Dictionary of Science and Technology (Walker ed., 1988); The Glossary of Genetics, 5th Ed., R. Rieger et al. (eds.), Springer Verlag (1991); and Hale & Marham, The Harper Collins Dictionary of Biology (1991). As used herein, the following terms have the meanings ascribed to them below, unless specified otherwise.

[0130] By “adenosine deaminase” is meant a polypeptide or fragment thereof capable of catalyzing the hydrolytic deamination of adenine or adenosine. In some embodiments, the deaminase or deaminase domain is an adenosine deaminase catalyzing the hydrolytic deamination of adenosine to inosine or deoxy adenosine to deoxyinosine. In some embodiments, the adenosine deaminase catalyzes the hydrolytic deamination of adenine or adenosine in deoxyribonucleic acid (DNA). The adenosine deaminases (e.g. engineered adenosine deaminases, evolved adenosine deaminases) provided herein may be from any organism, such as a bacterium.

[0131] By “Adenosine Deaminase Base Editor 8 (ABE8) polypeptide” or “ABE8” is meant a base editor as defined herein comprising an adenosine deaminase variant comprising an alteration at amino acid position 82 and/or 166 of the following reference sequence:

(SEQ ID NO: 8)
MSEVEFSHEYWMRHALTLAKRARDEREVPVGAVLVLNNRVIGEGWNRAIG
LHDPTAHAEIMALRQGGLVMQNYRLIDATLYVTFEPCVMCAGAMIHSRIG
RVVFGVRNAKTGAAGSLMDVLHYPGMNHRVEITEGILADECAALLCYFFR
MPRQVFNAQKKAQSSTD.

[0132] In some embodiments, ABE8 comprises further alterations, as described herein, relative to the reference sequence.

[0133] By “Adenosine Deaminase Base Editor 8 (ABE8) polynucleotide” is meant a polynucleotide encoding an ABE8.

[0134] “Administering” is referred to herein as providing one or more compositions described herein to a patient or a subject.

[0135] By “agent” is meant any small molecule chemical compound, antibody, nucleic acid molecule, or polypeptide, or fragments thereof.

[0136] By “alteration” is meant a change (increase or decrease) in the level, structure, or activity of an analyte, gene or polypeptide as detected by standard art known methods such as those described herein. As used herein, an alteration includes a 10% change in expression levels, a 25% change, a 40% change, and a 50% or greater change in expression levels. In some embodiments, an alteration includes an insertion, deletion, or substitution of a nucleobase or amino acid.

[0137] By “ameliorate” is meant decrease, suppress, attenuate, diminish, arrest, or stabilize the development or progression of a disease.

[0138] By “analog” is meant a molecule that is not identical, but has analogous functional or structural features. For example, a polypeptide analog retains the biological activity of a corresponding naturally-occurring polypeptide, while having certain biochemical modifications that enhance the analog's function relative to a naturally occurring polypeptide. Such biochemical modifications could increase the analog's protease resistance, membrane permeability, or half-life, without altering, for example, ligand binding. An analog may include an unnatural amino acid.

[0139] By “base editor (BE),” or “nucleobase editor polypeptide (NBE)” is meant an agent that binds a polynucleotide and has nucleobase modifying activity. In various embodiments, the base editor comprises a nucleobase modifying polypeptide (e.g., a deaminase) and a polynucleotide programmable nucleotide binding domain (e.g., Cas9 or Cpf1) in conjunction with a guide polynucleotide (e.g., guide RNA (gRNA)). Representative nucleic acid and protein sequences of base editors are provided in the Sequence Listing as SEQ ID NOs: 274-283.

[0140] By “base editing activity” is meant acting to chemically alter a base within a polynucleotide. In one embodiment, a first base is converted to a second base. In one embodiment, the base editing activity is cytidine deaminase activity, e.g., converting target C•G to T•A. In another embodiment, the base editing activity is adenosine or adenine deaminase activity, e.g., converting A•T to G•C.

[0141] The term “base editor system” refers to an intermolecular complex for editing a nucleobase of a target nucleotide sequence. In various embodiments, the base editor (BE) system comprises (1) a polynucleotide programmable nucleotide binding domain, a deaminase domain (e.g., cytidine deaminase or adenosine deaminase) for deaminating nucleobases in the target nucleotide sequence; and (2) one or more guide polynucleotides (e.g., guide RNA) in conjunction with the polynucleotide programmable nucleotide binding domain. In various embodiments, the base editor (BE) system comprises a nucleobase editor domain selected from an adenosine deaminase or a cytidine deaminase, and a domain having nucleic acid sequence specific binding activity. In some embodiments, the base editor system comprises (1) a base editor (BE) comprising a polynucleotide programmable DNA binding domain and a deaminase domain for deaminating one or more nucleobases in a target nucleotide sequence; and (2) one or more guide RNAs in conjunction with the polynucleotide programmable DNA binding domain. In some embodiments, the polynucleotide programmable nucleotide binding domain is a polynucleotide programmable DNA binding domain. In some embodiments, the base editor is a cytidine base editor (CBE). In some embodiments, the base editor is an adenine or adenosine base editor (ABE). In some embodiments, the base editor is an adenine or adenosine base editor (ABE) or a cytidine base editor (CBE).

[0142] By “base editing activity” is meant acting to chemically alter a base within a polynucleotide. In one embodiment, a first base is converted to a second base. In one embodiment, the base editing activity is cytidine deaminase activity, e.g., converting target C•G to T•A. In another embodiment, the base editing activity is adenosine deaminase activity, e.g., converting A•T to G•C.

[0143] The term “Cas9” or “Cas9 domain” refers to an RNA guided nuclease comprising a Cas9 protein, or a fragment thereof (e.g., a protein comprising an active, inactive, or partially active DNA cleavage domain of Cas9, and/or the gRNA binding domain of Cas9). A Cas9 nuclease is also referred to sometimes as a casnI nuclease or a CRISPR (clustered regularly interspaced short palindromic repeat) associated nuclease.

[0144] The term “conservative amino acid substitution” or “conservative mutation” refers to the replacement of one amino acid by another amino acid with a common property. A functional way to define common properties between individual amino acids is to analyze the normalized frequencies of amino acid changes between corresponding proteins of homologous organisms (Schulz, G. E. and Schirmer, R. H., Principles of Protein Structure, Springer-Verlag, New York (1979)). According to such analyses, groups of amino acids can be defined where amino acids within a group exchange preferentially with each other, and therefore resemble each other most in their impact on the overall protein structure (Schulz, G. E. and Schirmer, R. H., supra). Non-limiting examples of conservative mutations include amino acid substitutions of amino acids, for example, lysine for arginine and vice versa such that a positive charge can be maintained; glutamic acid for aspartic acid and vice versa such that a negative charge can be maintained; serine for threonine such that a free —OH can be maintained; and glutamine for asparagine such that a free —NH₂ can be maintained.

[0145] The term “coding sequence” or “protein coding sequence” as used interchangeably herein refers to a segment of a polynucleotide that codes for a protein. Coding sequences can also be referred to as open reading frames. The region or sequence is bounded nearer the 5′ end by a start codon and nearer the 3′ end with a stop codon. Stop codons useful with the base editors described herein include the following:

[0146] Glutamine CAG→TAG Stop codon
[0147] CAA→TAA

[0148] Arginine CGA→TGA

[0149] Tryptophan TGG→TGA
[0150] TGG→TAG
[0151] TGG→TAA

[0152] By “cytidine deaminase” is meant a polypeptide or fragment thereof capable of catalyzing a deamination reaction that converts an amino group to a carbonyl group. In one embodiment, the cytidine deaminase converts cytosine to uracil or 5-methylcytosine to thymine. PmCDA1 (SEQ ID NO: 41-42), which is derived from Petromyzon marinus (Petromyzon marinus cytosine deaminase 1, “PmCDA1”), AID (Activation-induced cytidine deaminase; AICDA) (Exemplary AID polypeptide sequences are provided in the Sequence Listing as SEQ ID NOs: 43-44, 1372, and 1374-1377), which is derived from a mammal (e.g., human, swine, bovine, horse, monkey etc.), and APOBEC are exemplary cytidine deaminases (Exemplary APOBEC polypeptide sequences are provided in the Sequence Listing as SEQ ID NOs: 1378-1416, 1421, and 1422. Further exemplary cytidine deaminase (CDA) sequences are provided in the Sequence Listing as SEQ ID NOs: 1373, 1417-1420. Additional exemplary cytidine deaminase sequences, including APOBEC polypeptide sequences, are provided in the Sequence Listing as SEQ ID NOs: 1378-1422. Some aspects of the disclosure provide base editor proteins and base editor systems that are capable of deaminating a cytosine in a nucleic acid molecule (e.g., DNA or RNA). In some embodiments the base editor protein or base editor system comprises a cytidine deaminase or cytosine deaminase that is capable of deaminating a cytidine to uridine in a nucleic acid molecule (e.g., DNA or RNA). It should be appreciated that any of the cytidine or cytosine deaminases provided herein include variants of naturally-occurring cytidine and cytosine deaminases. Such variants may be engineered to increase the efficiency of on-target deaminase activity of a base editor protein or system in a nucleic acid molecule (e.g., DNA or RNA).

[0153] The term “deaminase” or “deaminase domain,” as used herein, refers to a protein or enzyme that catalyzes a deamination reaction.

[0154] “Detect” refers to identifying the presence, absence or amount of the analyte to be detected. In one embodiment, a sequence alteration in a polynucleotide or polypeptide is detected. In another embodiment, the presence of indels is detected.

[0155] By “detectable label” is meant a composition that when linked to a molecule of interest renders the latter detectable, via spectroscopic, photochemical, biochemical, immunochemical, or chemical means. For example, useful labels include radioactive isotopes, magnetic beads, metallic beads, colloidal particles, fluorescent dyes, electron-dense reagents, enzymes (for example, as commonly used in an enzyme linked immunosorbent assay (ELISA)), biotin, digoxigenin, or haptens.

[0156] By “disease” is meant any condition or disorder that damages or interferes with the normal function of a cell, tissue, or organ. Exemplary diseases include neurological diseases and opthalmic diseases.

[0157] By “effective amount” is meant the amount of an agent or active compound, e.g., a base editor as described herein, that is required to ameliorate the symptoms of a disease relative to an untreated patient or an individual without disease, i.e., a healthy individual, or is the amount of the agent or active compound sufficient to elicit a desired biological response. The effective amount of active compound(s) used to practice the present invention for therapeutic treatment of a disease varies depending upon the manner of administration, the age, body weight, and general health of the subject. Ultimately, the attending physician or veterinarian will decide the appropriate amount and dosage regimen. Such amount is referred to as an “effective” amount. In one embodiment, an effective amount is the amount of a base editor of the invention sufficient to introduce an alteration in a gene of interest in a cell (e.g., a cell in vitro or in vivo). In one embodiment, an effective amount is the amount of a base editor required to achieve a therapeutic effect. Such therapeutic effect need not be sufficient to alter a pathogenic gene in all cells of a subject, tissue or organ, but only to alter the pathogenic gene in about 1%, 5%, 10%, 25%, 50%, 75% or more of the cells present in a subject, tissue or organ. In one embodiment, an effective amount is sufficient to ameliorate one or more symptoms of a disease.

[0158] The term “exonuclease” refers to a protein or polypeptide capable of digesting a nucleic acid (e.g., RNA or DNA) from free ends.

[0159] The term “endonuclease” refers to a protein or polypeptide capable of catalyzing (e.g., cleaving) internal regions in a nucleic acid (e.g., DNA or RNA).

[0160] By “fragment” is meant a portion of a polypeptide or nucleic acid molecule. This portion contains, at least about 10%, 20%, 30%, 40%, 50%, 60%, 70%, 80%, or 90% of the entire length of the reference nucleic acid molecule or polypeptide. A fragment may contain 10, 20, 30, 40, 50, 60, 70, 80, 90, or 100, 200, 300, 400, 500, 600, 700, 800, 900, or 1000 nucleotides or amino acids.

[0161] By “guide RNA” or “gRNA” is meant a polynucleotide or polynucleotide complex which is specific for a target sequence and can form a complex with a polynucleotide programmable nucleotide binding domain protein (e.g., Cas9 or Cpf1). In an embodiment, the guide polynucleotide is a guide RNA (gRNA). gRNAs can exist as a complex of two or more RNAs, or as a single RNA molecule.

[0162] By “tRNA” or “transfer RNA” is meant an RNA molecule comprising a secondary and/or tertiary structure that is capable of being cleaved in a cell. Cleavage may occur, for example, though an RNase, such as RNase P or RNase Z.

[0163] “Hybridization” means hydrogen bonding, which may be Watson-Crick, Hoogsteen or reversed Hoogsteen hydrogen bonding, between complementary nucleobases. For example, adenine and thymine are complementary nucleobases that pair through the formation of hydrogen bonds.

[0164] By “increases” is meant a positive alteration of at least 10%, 25%, 50%, 75%, or 100%.

[0165] The terms “inhibitor of base repair”, “base repair inhibitor”, “IBR” or their grammatical equivalents refer to a protein that is capable in inhibiting the activity of a nucleic acid repair enzyme, for example a base excision repair enzyme.

[0166] The terms “isolated,” “purified,” or “biologically pure” refer to material that is free to varying degrees from components which normally accompany it as found in its native state. “Isolate” denotes a degree of separation from original source or surroundings. “Purify” denotes a degree of separation that is higher than isolation. A “purified” or “biologically pure” protein is sufficiently free of other materials such that any impurities do not materially affect the biological properties of the protein or cause other adverse consequences. That is, a nucleic acid or peptide of this invention is purified if it is substantially free of cellular material, viral material, or culture medium when produced by recombinant DNA techniques, or chemical precursors or other chemicals when chemically synthesized. Purity and homogeneity are typically determined using analytical chemistry techniques, for example, polyacrylamide gel electrophoresis or high performance liquid chromatography. The term “purified” can denote that a nucleic acid or protein gives rise to essentially one band in an electrophoretic gel. For a protein that can be subjected to modifications, for example, phosphorylation or glycosylation, different modifications may give rise to different isolated proteins, which can be separately purified.

[0167] By “isolated polynucleotide” is meant a nucleic acid (e.g., a DNA) that is free of the genes which, in the naturally-occurring genome of the organism from which the nucleic acid molecule of the invention is derived, flank the gene. The term therefore includes, for example, a recombinant DNA that is incorporated into a vector; into an autonomously replicating plasmid or virus; or into the genomic DNA of a prokaryote or eukaryote; or that exists as a separate molecule (for example, a cDNA or a genomic or cDNA fragment produced by PCR or restriction endonuclease digestion) independent of other sequences. In addition, the term includes an RNA molecule that is transcribed from a DNA molecule, as well as a recombinant DNA that is part of a hybrid gene encoding additional polypeptide sequence.

[0168] By an “isolated polypeptide” is meant a polypeptide of the invention that has been separated from components that naturally accompany it. Typically, the polypeptide is isolated when it is at least 60%, by weight, free from the proteins and naturally-occurring organic molecules with which it is naturally associated. Preferably, the preparation is at least 75%, more preferably at least 90%, and most preferably at least 99%, by weight, a polypeptide of the invention. An isolated polypeptide of the invention may be obtained, for example, by extraction from a natural source, by expression of a recombinant nucleic acid encoding such a polypeptide; or by chemically synthesizing the protein. Purity can be measured by any appropriate method, for example, column chromatography, polyacrylamide gel electrophoresis, or by HPLC analysis.

[0169] The term “mutation,” as used herein, refers to a substitution of a residue within a sequence, e.g., a nucleic acid or amino acid sequence, with another residue, or a deletion or insertion of one or more residues within a sequence. Mutations are typically described herein by identifying the original residue followed by the position of the residue within the sequence and by the identity of the newly substituted residue. Various methods for making the amino acid substitutions (mutations) provided herein are well known in the art, and are provided by, for example, Green and Sambrook, Molecular Cloning: A Laboratory Manual (4^{th} ed., Cold Spring Harbor Laboratory Press, Cold Spring Harbor, N.Y. (2012)).

[0170] The terms “nucleic acid” and “nucleic acid molecule,” as used herein, refer to a compound comprising a nucleobase and an acidic moiety, e.g., a nucleoside, a nucleotide, or a polymer of nucleotides. Typically, polymeric nucleic acids, e.g., nucleic acid molecules comprising three or more nucleotides are linear molecules, in which adjacent nucleotides are linked to each other via a phosphodiester linkage. In some embodiments, “nucleic acid” refers to individual nucleic acid residues (e.g. nucleotides and/or nucleosides). In some embodiments, “nucleic acid” refers to an oligonucleotide chain comprising three or more individual nucleotide residues. As used herein, the terms “oligonucleotide” and “polynucleotide” can be used interchangeably to refer to a polymer of nucleotides (e.g., a string of at least three nucleotides). In some embodiments, “nucleic acid” encompasses RNA as well as single and/or double-stranded DNA. Nucleic acids may be naturally occurring, for example, in the context of a genome, a transcript, an mRNA, tRNA, rRNA, siRNA, snRNA, a plasmid, cosmid, chromosome, chromatid, or other naturally occurring nucleic acid molecule. On the other hand, a nucleic acid molecule may be a non-naturally occurring molecule, e.g., a recombinant DNA or RNA, an artificial chromosome, an engineered genome, or fragment thereof, or a synthetic DNA, RNA, DNA/RNA hybrid, or including non-naturally occurring nucleotides or nucleosides. Furthermore, the terms “nucleic acid,” “DNA,” “RNA,” and/or similar terms include nucleic acid analogs, e.g., analogs having other than a phosphodiester backbone. Nucleic acids can be purified from natural sources, produced using recombinant expression systems and optionally purified, chemically synthesized, etc. Where appropriate, e.g., in the case of chemically synthesized molecules, nucleic acids can comprise nucleoside analogs such as analogs having chemically modified bases or sugars, and backbone modifications. A nucleic acid sequence is presented in the 5′ to 3′ direction unless otherwise indicated. In some embodiments, a nucleic acid is or comprises natural nucleosides (e.g. adenosine, thymidine, guanosine, cytidine, uridine, deoxyadenosine, deoxythymidine, deoxyguanosine, and deoxycytidine); nucleoside analogs (e.g., 2-aminoadenosine, 2-thiothymidine, inosine, pyrrolo-pyrimidine, 3-methyl adenosine, 5-methylcytidine, 2-aminoadenosine, C5-bromouridine, C5-fluorouridine, C5-iodouridine, C5-propynyl-uridine, C5-propynyl-cytidine, C5-methylcytidine, 2-aminoadenosine, 7-deazaadenosine, 7-deazaguanosine, 8-oxoadenosine, 8-oxoguanosine, 0(6)-methylguanine, and 2-thiocytidine); chemically modified bases; biologically modified bases (e.g., methylated bases); intercalated bases; modified sugars (2′—e.g., fluororibose, ribose, 2′-deoxyribose, arabinose, and hexose); and/or modified phosphate groups (e.g., phosphorothioates and 5′-N-phosphoramidite linkages).

[0171] The term “nuclear localization sequence,” “nuclear localization signal,” or “NLS” refers to an amino acid sequence that promotes import of a protein into the cell nucleus. Nuclear localization sequences are known in the art and described, for example, in Plank et al., International PCT application, PCT/EP2000/011690, filed Nov. 23, 2000, published as WO/2001/038547 on May 31, 2001, the contents of which are incorporated herein by reference for their disclosure of exemplary nuclear localization sequences. In other embodiments, the NLS is an optimized NLS described, for example, by Koblan et al., Nature Biotech. 2018 doi:10.1038/nbt.4172. In some embodiments, an NLS comprises the amino acid sequence KRTADGSEFESPKKKRKV (SEQ ID NO: 84), KRPAATKKAGQAKKKK (SEQ ID NO: 85), KKTELQTTNAENKTKKL (SEQ ID NO: 86), KRGINDRNFWRGENGRKTR (SEQ ID NO: 87), RKSGKIAAIWKRPRK (SEQ ID NO: 88), PKKKRKV (SEQ ID NO: 89), or MDSLLMNRRKFLYQFKNVRWAKGRRETYLC (SEQ ID NO: 90).

[0172] The term “nucleobase,” “nitrogenous base,” or “base,” used interchangeably herein, refers to a nitrogen-containing biological compound that forms a nucleoside, which in turn is a component of a nucleotide. The ability of nucleobases to form base pairs and to stack one upon another leads directly to long-chain helical structures such as ribonucleic acid (RNA) and deoxyribonucleic acid (DNA). Five nucleobases—adenine (A), cytosine (C), guanine (G), thymine (T), and uracil (U)—are called primary or canonical. Adenine and guanine are derived from purine, and cytosine, uracil, and thymine are derived from pyrimidine. DNA and RNA can also contain other (non-primary) bases that are modified. Non-limiting exemplary modified nucleobases can include hypoxanthine, xanthine, 7-methylguanine, 5,6-dihydrouracil, 5-methylcytosine (m5C), and 5-hydromethylcytosine. Hypoxanthine and xanthine can be created through mutagen presence, both of them through deamination (replacement of the amine group with a carbonyl group). Hypoxanthine can be modified from adenine. Xanthine can be modified from guanine. Uracil can result from deamination of cytosine. A “nucleoside” consists of a nucleobase and a five carbon sugar (either ribose or deoxyribose). Examples of a nucleoside include adenosine, guanosine, uridine, cytidine, 5-methyluridine (m5U), deoxyadenosine, deoxyguanosine, thymidine, deoxyuridine, and deoxycytidine. Examples of a nucleoside with a modified nucleobase includes inosine (I), xanthosine (X), 7-methylguanosine (m7G), dihydrouridine (D), 5-methylcytidine (m5C), and pseudouridine (ψ). A “nucleotide” consists of a nucleobase, a five carbon sugar (either ribose or deoxyribose), and at least one phosphate group.

[0173] The terms “nucleic acid” and “nucleic acid molecule,” as used herein, refer to a compound comprising a nucleobase and an acidic moiety, e.g., a nucleoside, a nucleotide, or a polymer of nucleotides.

[0174] As used herein, the terms “oligonucleotide” and “polynucleotide” can be used interchangeably to refer to a polymer of nucleotides.

[0175] The term “nucleic acid programmable DNA binding protein” or “napDNAbp” may be used interchangeably with “polynucleotide programmable nucleotide binding domain” to refer to a protein that associates with a nucleic acid (e.g., DNA or RNA), such as a guide nucleic acid or guide polynucleotide (e.g., gRNA), that guides the napDNAbp to a specific nucleic acid sequence. In some embodiments, the polynucleotide programmable nucleotide binding domain is a polynucleotide programmable DNA binding domain. In some embodiments, the polynucleotide programmable nucleotide binding domain is a polynucleotide programmable RNA binding domain. In some embodiments, the polynucleotide programmable nucleotide binding domain is a Cas9 protein. A Cas9 protein can associate with a guide RNA that guides the Cas9 protein to a specific DNA sequence that is complementary to the guide RNA. In some embodiments, the napDNAbp is a Cas9 domain, for example a nuclease active Cas9, a Cas9 nickase (nCas9), or a nuclease inactive Cas9 (dCas9). Non-limiting examples of nucleic acid programmable DNA binding proteins include, Cas9 (e.g., dCas9 and nCas9), Cas12a/CpfI, Cas12b/C2cl, Cas12c/C2c3, Cas12d/CasY, Cas12e/CasX, Cas12g, Cas12h, Cas12i, and Cas12j/Casϕ (Cas12j/Casphi). Non-limiting examples of Cas enzymes include Cas1, Cas1B, Cas2, Cas3, Cas4, Cas5, Cas5d, Cas5t, Cas5h, Cas5a, Cas6, Cas7, Cas8, Cas8a, Cas8b, Cas8c, Cas9 (also known as Csn1 or Csx12), Cas10, Cas10d, Cas12a/CpfI, Cas12b/C2cl, Cas12c/C2c3, Cas12d/CasY, Cas12e/CasX, Cas12g, Cas12h, Cas12i, Cas12j/Casϕ, Cpf1, Csy1, Csy2, Csy3, Csy4, Cse1, Cse2, Cse3, Cse4, Cse5e, Csc1, Csc2, Csa5, Csn1, Csn2, Csm1, Csm2, Csm3, Csm4, Csm5, Csm6, Cmr1, Cmr3, Cmr4, Cmr5, Cmr6, Csb1, Csb2, Csb3, Csx17, Csx14, Csx10, Csx16, CsaX, Csx3, Csx1, Csx1S, Csx11, Csf1, Csf2, CsO, Csf4, Csd1, Csd2, Cst1, Cst2, Csh1, Csh2, Csa1, Csa2, Csa3, Csa4, Csa5, Type II Cas effector proteins, Type V Cas effector proteins, Type VI Cas effector proteins, CARF, DinG, homologues thereof, or modified or engineered versions thereof. Other nucleic acid programmable DNA binding proteins are also within the scope of this disclosure, although they may not be specifically listed in this disclosure. See, e.g., Makarova et al. “Classification and Nomenclature of CRISPR-Cas Systems: Where from Here?” CRISPR J. 2018 October; 1:325-336. doi: 10.1089/crispr.2018.0033; Yan et al., “Functionally diverse type V CRISPR-Cas systems” Science. 2019 Jan. 4; 363(6422):88-91. doi: 10.1126/science.aav7271, the entire contents of each are hereby incorporated by reference. Exemplary nucleic acid programmable DNA binding proteins and nucleic acid sequences encoding nucleic acid programmable DNA binding proteins are provided in the Sequence Listing as SEQ ID NOs: 223, 230-232, 235-242, 246-256, and 285-294.

[0176] The terms “nucleobase editing domain” or “nucleobase editing protein,” as used herein, refers to a protein or enzyme that can catalyze a nucleobase modification in RNA or DNA, such as cytosine (or cytidine) to uracil (or uridine) or thymine (or thymidine), and adenine (or adenosine) to hypoxanthine (or inosine) deaminations, as well as non-templated nucleotide additions and insertions. In some embodiments, the nucleobase editing domain is a deaminase domain (e.g., an adenine deaminase or an adenosine deaminase; or a cytidine deaminase or a cytosine deaminase).

[0177] As used herein, “obtaining” as in “obtaining an agent” includes synthesizing, purchasing, or otherwise acquiring the agent.

[0178] A “patient” or “subject” as used herein refers to a mammalian subject or individual diagnosed with, at risk of having or developing, or suspected of having or developing a disease or a disorder. In some embodiments, the term “patient” refers to a mammalian subject with a higher than average likelihood of developing a disease or a disorder. Exemplary patients can be humans, non-human primates, cats, dogs, pigs, cattle, cats, horses, camels, llamas, goats, sheep, rodents (e.g., mice, rabbits, rats, or guinea pigs) and other mammalians that can benefit from the therapies disclosed herein. Exemplary human patients can be male and/or female.

[0179] “Patient in need thereof” or “subject in need thereof” is referred to herein as a patient diagnosed with, at risk or having, predetermined to have, or suspected of having a disease or disorder.

[0180] The terms “pathogenic mutation”, “pathogenic variant”, “disease casing mutation”, “disease causing variant”, “deleterious mutation”, or “predisposing mutation” refers to a genetic alteration or mutation that increases an individual's susceptibility or predisposition to a certain disease or disorder. In some embodiments, the pathogenic mutation comprises at least one wild-type amino acid substituted by at least one pathogenic amino acid in a protein encoded by a gene.

[0181] The terms “protein”, “peptide”, “polypeptide”, and their grammatical equivalents are used interchangeably herein, and refer to a polymer of amino acid residues linked together by peptide (amide) bonds. A protein, peptide, or polypeptide can be naturally occurring, recombinant, or synthetic, or any combination thereof.

[0182] The term “fusion protein” as used herein refers to a hybrid polypeptide which comprises protein domains from at least two different proteins.

[0183] The term “recombinant” as used herein in the context of proteins or nucleic acids refers to proteins or nucleic acids that do not occur in nature, but are the product of human engineering. For example, in some embodiments, a recombinant protein or nucleic acid molecule comprises an amino acid or nucleotide sequence that comprises at least one, at least two, at least three, at least four, at least five, at least six, or at least seven mutations as compared to any naturally occurring sequence.

[0184] By “reduces” is meant a negative alteration of at least 10%, 25%, 50%, 75%, or 100%.

[0185] A “reference sequence” is a defined sequence used as a basis for sequence comparison. A reference sequence may be a subset of or the entirety of a specified sequence; for example, a segment of a full-length cDNA or gene sequence, or the complete cDNA or gene sequence. For polypeptides, the length of the reference polypeptide sequence will generally be at least about 16 amino acids, at least about 20 amino acids, at least about 25 amino acids, about 35 amino acids, about 50 amino acids, or about 100 amino acids. For nucleic acids, the length of the reference nucleic acid sequence will generally be at least about 50 nucleotides, at least about 60 nucleotides, at least about 75 nucleotides, about 100 nucleotides or about 300 nucleotides or any integer thereabout or therebetween. In some embodiments, a reference sequence is a wild-type sequence of a protein of interest. In other embodiments, a reference sequence is a polynucleotide sequence encoding a wild-type protein.

[0186] The term “RNA-programmable nuclease,” and “RNA-guided nuclease” are used with (e.g., binds or associates with) one or more RNA(s) that is not a target for cleavage. In some embodiments, an RNA-programmable nuclease, when in a complex with an RNA, may be referred to as a nuclease:RNA complex. Typically, the bound RNA(s) is referred to as a guide RNA (gRNA). In some embodiments, the RNA-programmable nuclease is the (CRISPR-associated system) Cas9 endonuclease, for example, Cas9 (CsnI) from Streptococcus pyogenes.

[0187] The term “single nucleotide polymorphism (SNP)” is a variation in a single nucleotide that occurs at a specific position in the genome, where each variation is present to some appreciable degree within a population (e.g., >1%).

[0188] By “specifically binds” is meant a nucleic acid molecule, polypeptide, polypeptide/polynucleotide complex, compound, or molecule that recognizes and binds a polypeptide and/or nucleic acid molecule of the invention, but which does not substantially recognize and bind other molecules in a sample, for example, a biological sample.

[0189] By “substantially identical” is meant a polypeptide or nucleic acid molecule exhibiting at least 50% identity to a reference amino acid sequence. In one embodiment, a reference sequence is a wild-type amino acid or nucleic acid sequence. In another embodiment, a reference sequence is any one of the amino acid or nucleic acid sequences described herein. In one embodiment, such a sequence is at least 60%, 80%, 85%, 90%, 95% or even 99% identical at the amino acid level or nucleic acid level to the sequence used for comparison.

[0190] Sequence identity is typically measured using sequence analysis software (for example, Sequence Analysis Software Package of the Genetics Computer Group, University of Wisconsin Biotechnology Center, 1710 University Avenue, Madison, Wis. 53705, BLAST, BESTFIT, GAP, or PILEUP/PRETTYBOX programs). Such software matches identical or similar sequences by assigning degrees of homology to various substitutions, deletions, and/or other modifications. Conservative substitutions typically include substitutions within the following groups: glycine, alanine; valine, isoleucine, leucine; aspartic acid, glutamic acid, asparagine, glutamine; serine, threonine; lysine, arginine; and phenylalanine, tyrosine. In an exemplary approach to determining the degree of identity, a BLAST program may be used, with a probability score between e⁻³ and e⁻¹⁰⁰ indicating a closely related sequence.

[0191] COBALT is used, for example, with the following parameters:

[0192] a) alignment parameters: Gap penalties-11,-1 and End-Gap penalties-5,-1,

[0193] b) CDD Parameters: Use RPS BLAST on; Blast E-value 0.003; Find Conserved columns and Recompute on, and

[0194] c) Query Clustering Parameters: Use query clusters on; Word Size 4; Max cluster distance 0.8; Alphabet Regular.

[0195] EMBOSS Needle is used, for example, with the following parameters:

[0196] a) Matrix: BLOSUM62;

[0197] b) GAP OPEN: 10;

[0198] c) GAP EXTEND: 0.5;

[0199] d) OUTPUT FORMAT: pair;

[0200] e) END GAP PENALTY: false;

[0201] f) END GAP OPEN: 10; and

[0202] g) END GAP EXTEND: 0.5.

[0203] Nucleic acid molecules useful in the methods of the invention include any nucleic acid molecule that encodes a polypeptide of the invention or a fragment thereof. Such nucleic acid molecules need not be 100% identical with an endogenous nucleic acid sequence, but will typically exhibit substantial identity. Polynucleotides having “substantial identity” to an endogenous sequence are typically capable of hybridizing with at least one strand of a double-stranded nucleic acid molecule. Nucleic acid molecules useful in the methods of the invention include any nucleic acid molecule that encodes a polypeptide of the invention or a fragment thereof. Such nucleic acid molecules need not be 100% identical with an endogenous nucleic acid sequence, but will typically exhibit substantial identity. Polynucleotides having “substantial identity” to an endogenous sequence are typically capable of hybridizing with at least one strand of a double-stranded nucleic acid molecule. By “hybridize” is meant pair to form a double-stranded molecule between complementary polynucleotide sequences (e.g., a gene described herein), or portions thereof, under various conditions of stringency. (See, e.g., Wahl, G. M. and S. L. Berger (1987) Methods Enzymol. 152:399; Kimmel, A. R. (1987) Methods Enzymol. 152:507).

[0204] For example, stringent salt concentration will ordinarily be less than about 750 mM NaCl and 75 mM trisodium citrate, preferably less than about 500 mM NaCl and 50 mM trisodium citrate, and more preferably less than about 250 mM NaCl and 25 mM trisodium citrate. Low stringency hybridization can be obtained in the absence of organic solvent, e.g., formamide, while high stringency hybridization can be obtained in the presence of at least about 35% formamide, and more preferably at least about 50% formamide. Stringent temperature conditions will ordinarily include temperatures of at least about 30° C., more preferably of at least about 37° C., and most preferably of at least about 42° C. Varying additional parameters, such as hybridization time, the concentration of detergent, e.g., sodium dodecyl sulfate (SDS), and the inclusion or exclusion of carrier DNA, are well known to those skilled in the art. Various levels of stringency are accomplished by combining these various conditions as needed. In a preferred: embodiment, hybridization will occur at 30° C. in 750 mM NaCl, 75 mM trisodium citrate, and 1% SDS. In a more preferred embodiment, hybridization will occur at 37° C. in 500 mM NaCl, 50 mM trisodium citrate, 1% SDS, 35% formamide, and 100 μg/ml denatured salmon sperm DNA (ssDNA). In a most preferred embodiment, hybridization will occur at 42° C. in 250 mM NaCl, 25 mM trisodium citrate, 1% SDS, 50% formamide, and 200 μg/ml ssDNA. Useful variations on these conditions will be readily apparent to those skilled in the art.

[0205] For most applications, washing steps that follow hybridization will also vary in stringency. Wash stringency conditions can be defined by salt concentration and by temperature. As above, wash stringency can be increased by decreasing salt concentration or by increasing temperature. For example, stringent salt concentration for the wash steps will preferably be less than about 30 mM NaCl and 3 mM trisodium citrate, and most preferably less than about 15 mM NaCl and 1.5 mM trisodium citrate. Stringent temperature conditions for the wash steps will ordinarily include a temperature of at least about 25° C., more preferably of at least about 42° C., and even more preferably of at least about 68° C. In an embodiment, wash steps will occur at 25° C. in 30 mM NaCl, 3 mM trisodium citrate, and 0.1% SDS. In another embodiment, wash steps will occur at 42 C in 15 mM NaCl, 1.5 mM trisodium citrate, and 0.1% SDS. In a more preferred embodiment, wash steps will occur at 68° C. in 15 mM NaCl, 1.5 mM trisodium citrate, and 0.1% SDS. Additional variations on these conditions will be readily apparent to those skilled in the art. Hybridization techniques are well known to those skilled in the art and are described, for example, in Benton and Davis (Science 196:180, 1977); Grunstein and Hogness (Proc. Natl. Acad. Sci., USA 72:3961, 1975); Ausubel et al. (Current Protocols in Molecular Biology, Wiley Interscience, New York, 2001); Berger and Kimmel (Guide to Molecular Cloning Techniques, 1987, Academic Press, New York); and Sambrook et al., Molecular Cloning: A Laboratory Manual, Cold Spring Harbor Laboratory Press, New York.

[0206] By “split” is meant divided into two or more fragments.

[0207] A “split Cas9 protein” or “split Cas9” refers to a Cas9 protein that is provided as an N-terminal fragment and a C-terminal fragment encoded by two separate nucleotide sequences. The polypeptides corresponding to the N-terminal portion and the C-terminal portion of the Cas9 protein may be spliced to form a “reconstituted” Cas9 protein.

[0208] The term “target site” refers to a sequence within a nucleic acid molecule that is deaminated by a deaminase (e.g., cytidine or adenine deaminase) or a fusion protein comprising a deaminase (e.g., a dCas9-adenosine deaminase fusion protein or a base editor disclosed herein).

[0209] As used herein, the terms “treat,” treating,” “treatment,” and the like refer to reducing or ameliorating a disorder and/or symptoms associated therewith or obtaining a desired pharmacologic and/or physiologic effect. It will be appreciated that, although not precluded, treating a disorder or condition does not require that the disorder, condition or symptoms associated therewith be completely eliminated. In some embodiments, the effect is therapeutic, i.e., without limitation, the effect partially or completely reduces, diminishes, abrogates, abates, alleviates, decreases the intensity of, or cures a disease and/or adverse symptom attributable to the disease. In some embodiments, the effect is preventative, i.e., the effect protects or prevents an occurrence or reoccurrence of a disease or condition. To this end, the presently disclosed methods comprise administering a therapeutically effective amount of a compositions as described herein.

[0210] By “uracil glycosylase inhibitor” or “UGI” is meant an agent that inhibits the uracil-excision repair system. Base editors comprising a cytidine deaminase convert cytosine to uracil, which is then converted to thymine through DNA replication or repair. Including an inhibitor of uracil DNA glycosylase (UGI) in the base editor prevents base excision repair which changes the U back to a C. An exemplary UGI comprises an amino acid sequence as follows:

>sp|P14739|UNGI_BPPB2 Uracil-DNA
glycosylase inhibitor
(SEQ ID NO: 106)
MTNLSDIIEKETGKQLVIQESILMLPEEVEEVIGNKPESDILVHTAYDES
TDENVMLLTSDAPEYKPWALVIQDSNGENKIKML.

[0211] Ranges provided herein are understood to be shorthand for all of the values within the range. For example, a range of 1 to 50 is understood to include any number, combination of numbers, or sub-range from the group consisting 1, 2, 3, 4, 5, 6, 7, 8, 9, 10, 11, 12, 13, 14, 15, 16, 17, 18, 19, 20, 21, 22, 23, 24, 25, 26, 27, 28, 29, 30, 31, 32, 33, 34, 35, 36, 37, 38, 39, 40, 41, 42, 43, 44, 45, 46, 47, 48, 49, or 50.

[0212] The recitation of a listing of chemical groups in any definition of a variable herein includes definitions of that variable as any single group or combination of listed groups. The recitation of an embodiment for a variable or aspect herein includes that embodiment as any single embodiment or in combination with any other embodiments or portions thereof.

[0213] All terms are intended to be understood as they would be understood by a person skilled in the art. Unless defined otherwise, all technical and scientific terms used herein have the same meaning as commonly understood by one of ordinary skill in the art to which the disclosure pertains.

[0214] In this application, the use of the singular includes the plural unless specifically stated otherwise. It must be noted that, as used in the specification, the singular forms “a,” “an” and “the” include plural referents unless the context clearly dictates otherwise. In this application, the use of “or” means “and/or” unless stated otherwise. Furthermore, use of the term “including” as well as other forms, such as “include”, “includes,” and “included,” is not limiting.

[0215] As used in this specification and claim(s), the words “comprising” (and any form of comprising, such as “comprise” and “comprises”), “having” (and any form of having, such as “have” and “has”), “including” (and any form of including, such as “includes” and “include”) or “containing” (and any form of containing, such as “contains” and “contain”) are inclusive or open-ended and do not exclude additional, unrecited elements or method steps. It is contemplated that any embodiment discussed in this specification can be implemented with respect to any method or composition of the present disclosure, and vice versa. Furthermore, compositions of the present disclosure can be used to achieve methods of the present disclosure.

[0216] The term “about” or “approximately” means within an acceptable error range for the particular value as determined by one of ordinary skill in the art, which will depend in part on how the value is measured or determined, i.e., the limitations of the measurement system. For example, “about” can mean within 1 or more than 1 standard deviation, per the practice in the art. Alternatively, “about” can mean a range of up to 20%, up to 10%, up to 5%, or up to 1% of a given value. Alternatively, particularly with respect to biological systems or processes, the term can mean within an order of magnitude, e.g., within 5-fold, within 2-fold of a value. Where particular values are described in the application and claims, unless otherwise stated, the term “about” means within an acceptable error range for the particular value should be assumed.

[0217] Reference in the specification to “certain embodiments,” “some embodiments,” “an embodiment,” “one embodiment” or “other embodiments” means that a particular feature, structure, or characteristic described in connection with the embodiments is included in at least some embodiments, but not necessarily all embodiments, of the present disclosures.

### B. RECOMBINANT RABIES VIRUSES

[0218] Provided herein are recombinant rabies viruses that are useful for transducing a target cell. In one aspect, a recombinant rabies virus of the present disclosure comprises a rabies virus glycoprotein and a recombinant rabies virus genome. In certain embodiments, the recombinant rabies virus genome encodes a nucleic acid comprising a transgene. In certain embodiments, the recombinant rabies virus genome encodes a nucleic acid comprising a therapeutic transgene. As such, recombinant rabies viruses of the present disclosure can be employed in a method for transducing a target cell, wherein the recombinant rabies virus comprises a rabies virus glycoprotein and a recombinant rabies virus genome comprising a nucleic acid comprising a transgene (e.g., a therapeutic transgene). Upon transduction of the target cell, the transgene comprised within the recombinant rabies virus genome is expressed and a transgene product is produced.

[0219] Also known as Rabies lyssavirus, Rabies virus is a negative sense single stranded RNA virus of the Lyssavirus genus of the Rhabdoviridae family. Rabies virus has a cylindrical morphology, and the structure includes a lipoprotein envelope composed of glygoprotein G surrounding a helical ribonucleoprotein core. The rabies virus genome contains five genes that encode for proteins that promote transcription and replication of the genome and proteins that make up the structural components of the virus. The five genes are: the N gene encoding for a rabies virus nucleoprotein; the P gene encoding for a rabies virus phosphoprotein; the M gene encoding for a rabies virus matrix protein; the G gene encoding for a rabies virus glycoprotein; and the L gene encoding for a rabies virus polymerase. Viral genome RNA and the nucleoprotein together form a ribonucleoprotein that functions as a template for replication and transcription by the rabies virus polymerase (an RNA-dependent RNA polymerase).

[0220] In certain embodiments, a recombinant rabies virus genome of the present disclosure has one or more rabies virus genes removed. For example, the N gene, the P gene, the M gene, the L gene, and/or the G gene may be absent from the recombinant rabies virus genome. In certain embodiments, the recombinant rabies virus genome lacks a G gene encoding for a rabies virus glycoprotein or a functional variant thereof. Recombinant rabies virus genomes that lack a G gene encoding for a rabies virus glycoprotein prevents the virus from being able to endogenously produce glycoprotein. Because the glycoprotein is only required for the final steps of the viral life cycle, this deletion prevents the virus from spreading beyond initially infected cells, but it does not prevent the virus from completing the entirety of its replication cycle up to that point. In certain embodiments, the recombinant rabies virus genome lacks an L gene encoding for a rabies virus polymerase or a functional variant thereof. The L gene product is required both for transcription of viral genes and for replication of the viral genome, and deletion of the L gene may result in less cytotoxicity of a target transduced cell. See, e.g., Chatterjee et al., Nat. Neurosci. (2018) 21(4): 638-646, the disclosure of which is herein incorporated by reference in its entirety. In certain embodiments, the recombinant rabies virus genome lacks a G gene encoding for a rabies virus glycoprotein or a functional variant thereof, and lacks an L gene encoding for a rabies virus polymerase or a functional variant thereof.

[0221] It is readily appreciated by those of ordinary skill in the art that a recombinant rabies virus genome that lacks a rabies virus gene, as described herein, refers to a rabies virus genome that lacks all or a portion of the rabies virus gene. For example, a recombinant rabies virus genome that lacks a G gene may lack all or a portion of the G gene, wherein the portion of the G gene is required for the function of the G gene product. In certain embodiments, lacking a portion of the G gene that is required for the function of the G gene product may result in the production of a truncated, non-functional glycoprotein. In certain embodiments, a recombinant rabies virus genome that lacks an L gene may lack all or a portion of the L gene, wherein the portion of the L gene is required for the function of the L gene product. In certain embodiments, lacking a portion of the L gene that is required for the function of the L gene product may result in the production of a truncated, non-functional RNA-dependent RNA polymerase.

[0222] In certain embodiments, a recombinant rabies virus genome of the present disclosure encodes a nucleic acid comprising a transgene. In certain embodiments, the nucleic acid comprising a transgene replaces the one or more rabies virus genes that are removed, as described herein. For example, the nucleic acid comprising a transgene may replace all or a portion of a rabies virus gene. In certain embodiments, the nucleic acid comprising a transgene replaces all or a portion of a G gene, wherein the portion of the G gene is required for the function of the G gene product. In certain embodiments, the nucleic acid comprising a transgene replaces all or a portion of an L gene, wherein the portion of the L gene is required for the function of the L gene product. In certain embodiments, the nucleic acid comprising a transgene replaces all or a portion of an L gene, wherein the portion of the L gene is required for the function of the L gene product; and all or a portion of a G gene, wherein the portion of the G gene is required for the function of the G gene product.

[0223] In certain embodiments, a recombinant rabies virus genome of the present disclosure encodes a nucleic acid comprising a transgene, wherein the transgene replaces the one or more rabies virus genes that are removed, as described herein. In certain embodiments, the recombinant rabies virus genome comprises an N gene encoding for a rabies virus nucleoprotein or a functional variant thereof, a P gene encoding for a rabies virus phosphoprotein or a functional variant thereof, and/or an M gene encoding for a rabies virus matrix protein or a functional variant thereof.

[0224] Exemplary nucleic acid sequences of the N, P, M, L, and G genes, and the amino acid sequence of the gene products thereof are provided in Table 1.

TABLE 1
Exemplary sequences for N, P, M, L, and G

| SEQ ID | |
|---|---|
| NO: | Sequence |
| SEQ ID | atggatgccgacaagattgtattcaaagtcaataatcaggtggtctctttgaagc |
| NO: 4001 | ctgagattatcgtggatcaatatgagtacaagtaccctgccatcaaagatttgaa |
| N gene | aaagccctgtataaccctaggaaaggctcccgatttaaataaagcatacaagtca |
| (nucleic | gttttgtcaggcatgagcgccgccaaacttaatcctgacgatgtatgttcctatt |
| acid) | tggcagcggcaatgcagttttttgaggggacatgtccggaagactggaccagcta |
| | tggaattgtgattgcacgaaaaggagataagatcaccccaggttctctggtggag |
| | ataaaacgtactgatgtagaagggaattgggctctgacaggaggcatggaactga |
| | caagagaccccactgtccctgagcatgcgtccttagtcggtcttctcttgagtct |
| | gtataggttgagcaaaatatccgggcaaaacactggtaactataagacaaacatt |
| | gcagacaggatagagcagatttttgagacagccccttttgttaaaatcgtggaac |
| | accatactctaatgacaactcacaaaatgtgtgctaattggagtactataccaaa |
| | cttcagatttttggccggaacctatgacatgtttttctcccggattgagcatcta |
| | tattcagcaatcagagtgggcacagttgtcactgcttatgaagactgttcaggac |
| | tggtatcatttactgggttcataaaacaaatcaatctcaccgctagagaggcaat |
| | actatatttcttccacaagaactttgaggaagagataagaagaatgtttgagcca |
| | gggcaggagacagctgttcctcactcttatttcatccacttccgttcactaggct |
| | tgagtgggaaatctccttattcatcaaatgctgttggtcacgtgttcaatctcat |
| | tcactttgtaggatgctatatgggtcaagtcagatccctaaatgcaacggttatt |
| | gctgcatgtgctcctcatgaaatgtctgttctagggggctatctgggagaggaat |
| | tcttcgggaaagggacatttgaaagaagattcttcagagatgagaaagaacttca |
| | agaatacgaggcggctgaactgacaaagactgacgtagcactggcagatgatgga |
| | actgtcaactctgacgacgaggactacttttcaggtgaaaccagaagtccggagg |
| | ctgtttatactcgaatcatgatgaatggaggtcgactaaagagatctcacatacg |
| | gagatatgtctcagtcagttccaatcatcaagcccgtccaaactcattcgccgag |
| | tttctaaacaagacatattcgagtgactca |
| SEQ ID | ATGGATGCCGACAAGATTGTATTCAAAGTCAACAACCAGGTGGTGTCCCTGAAGC |
| NO: 4013 | CTGAGATCATCGTGGACCAGTACGAGTACAAGTACCCCGCCATCAAGGACCTGAA |
| N gene | GAAGCCCTGTATCACCCTGGGCAAAGCCCCTGACCTGAACAAAGCCTACAAGAGC |
| codon | GTGCTGAGCGGCATGTCTGCCGCCAAGCTGAACCCTGATGACGTGTGCTCTTATC |
| optimzed | TGGCCGCTGCCATGCAGTTCTTCGAGGGCACATGTCCCGAGGACTGGACCAGCTA |
| (nucleic | TGGAATCGTGATCGCCCGGAAGGGCGATAAGATCACACCTGGCAGCCTGGTGGAA |
| acid) | ATCAAGAGAACCGACGTGGAAGGCAACTGGGCCCTGACAGGTGGCATGGAACTGA |
| | CCAGAGATCCCACCGTGCCTGAGCACGCTTCTCTTGTTGGACTGCTGCTGAGCCT |
| | GTACCGGCTGTCTAAGATCAGCGGACAGAACACCGGCAACTACAAGACCAATATC |
| | GCCGACCGGATCGAGCAGATTTTCGAGACAGCCCCTTTCGTGAAGATCGTGGAAC |
| | ACCACACACTGATGACCACACACAAGATGTGCGCCAACTGGTCTACAATCCCCAA |
| | CTTCAGATTCCTGGCCGGCACCTACGACATGTTCTTCAGCAGAATCGAGCACCTG |
| | TACTCTGCCATCAGAGTGGGCACAGTCGTGACCGCCTACGAGGATTGCTCTGGCC |
| | TGGTGTCCTTCACCGGCTTCATCAAGCAGATCAACCTGACCGCCAGAGAGGCCAT |
| | CCTGTACTTTTTCCACAAGAACTTCGAGGAAGAGATCCGGCGGATGTTCGAGCCC |
| | GGACAAGAAACAGCCGTGCCTCACAGCTACTTCATCCACTTCAGAAGCCTGGGCC |
| | TGTCCGGCAAGAGCCCCTACTCTTCTAATGCCGTGGGCCACGTGTTCAACCTGAT |
| | CCACTTCGTGGGCTGCTACATGGGCCAAGTGCGGAGCCTGAATGCCACAGTGATT |
| | GCCGCCTGTGCTCCCCACGAAATGTCTGTGCTCGGAGGCTATCTGGGCGAAGAGT |
| | TCTTTGGCAAGGGCACCTTCGAGCGGAGATTCTTCCGGGACGAGAAAGAGCTGCA |
| | AGAGTACGAGGCCGCCGAGCTGACCAAAACAGATGTGGCCCTGGCCGATGACGGC |
| | ACCGTGAACTCTGACGACGAGGACTACTTCAGCGGCGAGACTAGAAGCCCCGAGG |
| | CCGTGTATACCCGGATTATGATGAATGGCGGCAGGCTGAAGCGGAGCCACATTCG |
| | GAGATACGTGTCCGTGTCCAGCAACCATCAGGCCAGACCTAACAGCTTCGCCGAG |
| | TTCCTGAACAAGACCTACTCGAGTGACTCATAA |
| SEQ ID | MDADKIVFKVNNQVVSLKPEIIVDQYEYKYPAIKDLKKPCITLGKAPDLNKAYKS |
| NO: 4002 | VLSGMSAAKLNPDDVCSYLAAAMQFFEGTCPEDWTSYGIVIARKGDKITPGSLVE |
| N gene | IKRTDVEGNWALTGGMELTRDPTVPEHASLVGLLLSLYRLSKISGQNTGNYKTNI |
| (amino | ADRIEQIFETAPFVKIVEHHTLMTTHKMCANWSTIPNFRFLAGTYDMFFSRIEHL |
| acid) | YSAIRVGTVVTAYEDCSGLVSFTGFIKQINLTAREAILYFFHKNFEEEIRRMFEP |
| | GQETAVPHSYFIHFRSLGLSGKSPYSSNAVGHVFNLIHFVGCYMGQVRSLNATVI |
| | AACAPHEMSVLGGYLGEEFFGKGTFERRFFRDEKELQEYEAAELTKTDVALADDG |
| | TVNSDDEDYFSGETRSPEAVYTRIMMNGGRLKRSHIRRYVSVSSNHQARPNSFAE |
| | FLNKTYSSDS |
| SEQ ID | ctcgatcctggagaggtctatgatgaccctattgacccaatcgagttagaggctg |
| NO: 4003 | aacccagaggaacccccattgtccccaacatcttgaggaactctgactacaatct |
| L gene | caactctcdttgatagaagatcctgctagactaatgttagaatggttaaaaacag |
| (nucleic | ggaatagaccttatcggatgactctaacagacaattgctccaggtctttcagagt |
| acid) | tttgaaagattatttcaagaaggtagatttgggttctctcaaggtgggcggaatg |
| | gctgcacagtcaatgatttctctctggttatatggtgcccactctgaatccaaca |
| | ggagccggagatgtataacagacttggcccatttctattccaagtcgtcccccat |
| | agagaagctgttgaatctcacgctaggaaatagagggctgagaatccccccagag |
| | ggagtgttaagttgccttgagagggttgattatgataatgcatttggaaggtatc |
| | ttgccaacacgtattcctcttacttgttcttccatgtaatcaccttatacatgaa |
| | cgccctagactgggatgaagaaaagaccatcctagcattatggaaagatttaacc |
| | tcagtggacatcgggaaggacttggtaaagttcaaagaccaaatatggggactgc |
| | tgatcgtgacaaaggactttgtttactcccaaagttccaattgtctttttgacag |
| | aaactacacacttatgctaaaagatcttttcttgtctcgcttcaactccttaatg |
| | gtcttgctctctcccccagagccccgatactcagatgacttgatatctcaactat |
| | gccagctgtacattgctggggatcaagtcttgtctatgtgtggaaactccggcta |
| | tgaagtcatcaaaatattggagccatatgtcgtgaatagtttagtccagagagca |
| | gaaaagtttaggcctctcattcattccttgggagactttcctgtatttataaaag |
| | acaaggtaagtcaacttgaagagacgttcggtccctgtgcaagaaggttctttag |
| | ggctctggatcaattcgacaacatacatgacttggtttttgtgtttggctgttac |
| | aggcattgggggcacccatatatagattatcgaaagggtctgtcaaaactatatg |
| | atcaggttcaccttaaaaaaatgatagataagtcctaccaggagtgcttagcaag |
| | cgacctagccaggaggatccttagatggggttttgataagtactccaagtggtat |
| | ctggattcaagattcctagcccgagaccacccdtgactccttatatcaaaaccca |
| | aacatggccacccaaacatattgtagacttggtgggggatacatggcacaagctc |
| | ccgatcacgcagatctttgagattcctgaatcaatggatccgtcagaaatattgg |
| | atgacaaatcacattctttcaccagaacgagactagcttcttggctgtcagaaaa |
| | ccgaggggggcctgttcctagcgaaaaagttattatcacggccctgtctaagccg |
| | cctgtcaatccccgagagtttctgaggtctatagacctcggaggattgccagatg |
| | aagacttgataattggcctcaagccaaaggaacgggaattgaagattgaaggtcg |
| | attctttgctctaatgtcatggaatctaagattgtattttgtcatcactgaaaaa |
| | ctcttggccaactacatcttgccactttttgacgcgctgactatgacagacaacc |
| | tgaacaaggtgtttaaaaagctgatcgacagggtcaccgggcaagggcttttgga |
| | ctattcaagggtcacatatgcatttcacctggactatgaaaagtggaacaaccat |
| | caaagattagagtcaacagaggatgtattttctgtcctagatcaagtgtttggat |
| | tgaagagagtgttttctagaacacacgagttttttcaaaaggcctggatctatta |
| | ttcagacagatcagacctcatcgggttacgggaggatcaaatatactgcttagat |
| | gcgtccaacggcccaacctgttggaatggccaggatggcgggctagaaggcttac |
| | ggcagaagggctggagtctagtcagcttattgatgatagatagagaatctcaaat |
| | caggaacacaagaaccaaaatactagctcaaggagacaaccaggttttatgtccg |
| | acatacatgttgtcgccagggctatctcaagaggggctcctctatgaattggaga |
| | gaatatcaaggaatgcactttcgatatacagagccgtcgaggaaggggcatctaa |
| | gctagggctgatcatcaagaaagaagagaccatgtgtagttatgacttcctcatc |
| | tatggaaaaacccctttgtttagaggtaacatattggtgcctgagtccaaaagat |
| | gggccagagtctcttgcgtctctaatgaccaaatagtcaacctcgccaatataat |
| | gtcgacagtgtccaccaatgcgctaacagtggcacaacactctcaatctttgatc |
| | aaaccgatgagggattttctgctcatgtcagtacaggcagtctttcactacctgc |
| | tatttagcccaatcttaaagggaagagtttacaagattctgagcgctgaagggga |
| | gagctttctcctagccatgtcaaggataatctatctagatccttctttgggaggg |
| | atatctggaatgtccctcggaagattccatatacgacagttctcagaccctgtct |
| | ctgaagggttatccttctggagagagatctggttaagctcccaagagtcctggat |
| | tcacgcgttgtgtcaagaggctggaaacccagatcttggagagagaacactcgag |
| | agcttcactcgccttctagaagatccgaccaccttaaatatcagaggaggggcca |
| | gtcctaccattctactcaaggatgcaatcagaaaggctttatatgacgaggtgga |
| | caaggtggaaaattcagagtttcgagaggcaatcctgttgtccaagacccataga |
| | gataattttatactcttcttaatatctgttgagcctctgtttcctcgatttctca |
| | gtgagctattcagttcgtcttttttgggaatccccgagtcaatcattggattgat |
| | acaaaactcccgaacgataagaaggcagtttagaaagagtctctcaaaaacttta |
| | gaagaatccttctacaactcagagatccacgggattagtcggatgacccagacac |
| | ctcagagggttgggggggtgtggccttgctcttcagagagggcagatctacttag |
| | ggagatctcttggggaagaaaagtggtaggcacgacagttcctcacccttctgag |
| | atgttgggattacttcccaagtcctctatttcttgcacttgtggagcaacaggag |
| | gaggcaatcctagagtttctgtatcagtactcccgtcctttgatcagtcattttt |
| | ttcacgaggccccctaaagggatacttgggctcgtccacctctatgtcgacccag |
| | ctattccatgcatgggaaaaagtcactaatgttcatgtggtgaagagagctctat |
| | cgttaaaagaatctataaactggttcattactagagattccaacttggctcaagc |
| | tctaattaggaacattatgtctctgacaggccctgatttccctctagaggaggcc |
| | cctgtcttcaaaaggacggggtcagccttgcataggttcaagtctgccagataca |
| | gcgaaggagggtattcttctgtctgcccgaacctcctctctcatatttctgttag |
| | tacagacaccatgtctgatttgacccaagacgggaagaactacgatttcatgttc |
| | cagccattgatgctttatgcacagacatggacatcagagctggtacagagagaca |
| | caaggctaagagactctacgtttcattggcacctccgatgcaacaggtgtgtgag |
| | acccattgacgacgtgaccctggagacctctcagatcttcgagtttccggatgtg |
| | tcgaaaagaatatccagaatggtttctggggctgtgcctcacttccagaggcttc |
| | ccgatatccgtctgagaccaggagattttgaatctctaagcggtagagaaaagtc |
| | tcaccatatcggatcagctcaggggctcttatactcaatcttagtggcaattcac |
| | gactcaggatacaatgatggaaccatcttccctgtcaacatatacggcaaggttt |
| | cccctagagactatttgagagggctcgcaaggggagtattgataggatcctcgat |
| | ttgcttcttgacaagaatgacaaatatcaatattaatagacctcttgaattggtc |
| | tcaggggtaatctcatatattctcctgaggctagataaccatccctccttgtaca |
| | taatgctcagagaaccgtctcttagaggagagatattttctatccctcagaaaat |
| | ccccgccgcttatccaaccactatgaaagaaggcaacagatcaatcttgtgttat |
| | ctccaacatgtgctacgctatgagcgagagataatcacggcgtctccagagaatg |
| | actggctatggatcttttcagactttagaagtgccaaaatgacgtacctatccct |
| | cattacttaccagtctcatcttctactccagagggttgagagaaacctatctaag |
| | agtatgagagataacctgcgacaattgagttctttgatgaggcaggtgctgggcg |
| | ggcacggagaagataccttagagtcagacgacaacattcaacgactgctaaaaga |
| | ctctttacgaaggacaagatgggtggatcaagaggtgcgccatgcagctagaacc |
| | atgactggagattacagccccaacaagaaggtgtcccgtaaggtaggatgttcag |
| | aatgggtctgctctgctcaacaggttgcagtctctacctcagcaaacccggcccc |
| | tgtctcggagcttgacataagggccctctctaagaggttccagaaccctttgatc |
| | tcgggcttgagagtggttcagtgggcaaccggtgctcattataagcttaagccta |
| | ttctagatgatctcaatgttttcccatctctctgccttgtagttggggacgggtc |
| | aggggggatatcaagggcagtcctcaacatgtttccagatgccaagcttgtgttc |
| | aacagtcttttagaggtgaatgacctgatggcttccggaacacatccactgcctc |
| | cttcagcaatcatgaggggaggaaatgatatcgtctccagagtgatagatcttga |
| | ctcaatctgggaaaaaccgtccgacttgagaaacttggcaacctggaaatacttc |
| | cagtcagtccaaaagcaggtcaacatgtcctatgacctcattatttgcgatgcag |
| | aagttactgacattgcatctatcaaccggatcaccctgttaatgtccgattttgc |
| | attgtctatagatggaccactctatttggtcttcaaaacttatgggactatgcta |
| | gtaaatccaaactacaaggctattcaacacctgtcaagagcgttcccctcggtca |
| | cagggtttatcacccaagtaacttcgtctttttcatctgagctctacctccgatt |
| | ctccaaacgagggaagtttttcagagatgctgagtacttgacctcttccaccctt |
| | cgagaaatgagccttgtgttattcaattgtagcagccccaagagtgagatgcaga |
| | gagctcgttccttgaactatcaggatcttgtgagaggatttcctgaagaaatcat |
| | atcaaatccttacaatgagatgatcataactctgattgacagtgatgtagaatct |
| | tttctagtccacaagatggttgatgatcttgagttacagaggggaactctgtcta |
| | aagtggctatcattatagccatcatgatagttttctccaacagagtcttcaacgt |
| | ttccaaacccctaactgacccctcgttctatccaccgtctgatcccaaaatcctg |
| | aggcacttcaacatatgttgcagtactatgatgtatctatctactgctttaggtg |
| | acgtccctagcttcgcaagacttcacgacctgtataacagacctataacttatta |
| | cttcagaaagcaagtcattcgagggaacgtttatctatcttggagttggtccaac |
| | gacacctcagtgttcaaaagggtagcctgtaattctagcctgagtctgtcatctc |
| | actggatcaggttgatttacaagatagtgaagactaccagactcgttggcagcat |
| | caaggatctatccagagaagtggaaagacaccttcataggtacaacaggtggatc |
| | accctagaggatatcagatctagatcatccctactagactacagttgcctg |
| SEQ ID | ATGCTCGATCCTGGAGAGGTCTATGATGACCCCATCGATCCTATCGAGCTGGAAG |
| NO: 4014 | CCGAGCCTAGAGGCACACCCATCGTGCCCAACATCCTGCGGAACAGCGACTACAA |
| L gene | CCTGAACAGCCCTCTGATCGAGGACCCCGCCAGACTGATGCTGGAATGGCTGAAA |
| codon | ACCGGCAACAGACCCTACCGGATGACCCTGACCGATAACTGCTCCCGGTCCTTCA |
| optimized | GGGTGCTGAAGGACTACTTCAAGAAGGTGGACCTGGGCAGCCTGAAAGTCGGAGG |
| (nucleic | AATGGCCGCTCAGAGCATGATCAGCCTGTGGCTGTATGGCGCCCACAGCGAGAGC |
| acid) | AACAGATCCAGAAGATGCATCACCGATCTGGCCCACTTCTACAGCAAGAGCAGCC |
| | CCATCGAGAAGCTGCTGAATCTGACCCTGGGCAACCGCGGCCTGAGAATACCTCC |
| | TGAAGGCGTGCTGAGCTGCCTGGAAAGAGTGGACTACGACAACGCCTTCGGCAGA |
| | TACCTGGCCAACACCTACAGCAGCTACCTGTTCTTCCACGTGATCACCCTGTATA |
| | TGAACGCCCTGGACTGGGACGAAGAGAAAACCATTCTGGCCCTGTGGAAGGACCT |
| | GACCTCTGTGGACATCGGCAAGGACCTGGTCAAGTTCAAGGACCAGATTTGGGGC |
| | CTGCTGATCGTGACCAAGGACTTCGTGTACTCCCAGAGCAGCAACTGCCTGTTCG |
| | ACCGGAACTACACCCTGATGCTGAAAGACCTGTTCCTGAGCCGGTTCAACAGCCT |
| | GATGGTGCTGCTGTCTCCTCCAGAGCCTAGATACAGCGACGACCTGATCTCCCAG |
| | CTGTGCCAGCTGTATATTGCCGGCGATCAGGTGCTGAGCATGTGCGGCAATAGCG |
| | GCTACGAAGTGATCAAGATCCTGGAACCTTACGTCGTGAACAGCCTGGTGCAGCG |
| | GGCCGAGAAGTTCAGACCACTGATTCACAGCCTGGGCGACTTCCCCGTGTTCATC |
| | AAGGACAAGGTGTCCCAGCTGGAAGAGACATTCGGCCCCTGCGCCAGAAGATTCT |
| | TCAGAGCCCTGGACCAGTTCGACAACATCCACGACCTGGTGTTCGTGTTCGGCTG |
| | CTACAGACACTGGGGACACCCCTACATCGACTACAGAAAGGGCCTGAGCAAGCTG |
| | TACGACCAGGTTCACCTGAAGAAGATGATCGACAAGAGCTACCAAGAGTGCCTGG |
| | CCAGCGACCTGGCCAGACGTATTCTGAGATGGGGCTTCGACAAGTACAGCAAGTG |
| | GTATCTGGACAGCCGGTTCCTGGCTCGGGATCACCCTCTGACTCCCTACATCAAG |
| | ACCCAGACCTGGCCTCCTAAGCACATCGTGGATCTCGTGGGCGACACCTGGCACA |
| | AGCTGCCCATCACACAGATTTTCGAGATCCCCGAGAGCATGGACCCCAGCGAGAT |
| | TCTGGACGACAAGTCCCACAGCTTCACCCGGACAAGACTGGCCTCTTGGCTGAGC |
| | GAGAATAGAGGCGGACCTGTGCCTAGCGAGAAAGTGATCATCACCGCTCTGTCCA |
| | AGCCTCCAGTGAACCCCAGAGAGTTCCTGCGGTCTATCGATCTCGGCGGCCTGCC |
| | TGATGAGGACCTGATCATTGGCCTGAAGCCTAAAGAGCGCGAGCTGAAGATCGAG |
| | GGCAGATTCTTCGCCCTGATGAGCTGGAACCTGCGGCTGTACTTTGTGATCACCG |
| | AGAAACTGCTGGCCAACTACATCCTGCCTCTGTTCGACGCCCTGACCATGACCGA |
| | CAATCTGAACAAGGTGTTCAAGAAACTGATCGACAGAGTGACCGGCCAGGGACTG |
| | CTGGACTACAGCAGAGTGACATACGCCTTCCACCTGGATTACGAGAAGTGGAACA |
| | ACCACCAGCGGCTGGAAAGCACCGAGGACGTGTTCTCTGTGCTGGACCAGGTGTT |
| | CGGCCTGAAGAGAGTGTTCAGCAGAACCCACGAGTTCTTCCAGAAAGCCTGGATC |
| | TACTACAGCGACCGCAGCGATCTGATCGGACTGAGAGAGGACCAAATCTACTGCC |
| | TGGACGCCAGCAATGGCCCTACCTGTTGGAATGGACAGGACGGCGGACTGGAAGG |
| | ACTGAGACAGAAAGGCTGGTCCCTGGTGTCCCTGCTGATGATTGACAGAGAGAGC |
| | CAGATCAGAAACACGCGGACCAAGATTCTGGCTCAGGGCGACAACCAGGTGCTGT |
| | GCCCTACCTATATGCTGAGCCCTGGCCTGTCTCAAGAGGGGCTGCTGTACGAACT |
| | GGAACGGATCAGCAGAAACGCCCTGTCCATCTATAGAGCCGTGGAAGAGGGCGCC |
| | TCTAAGCTGGGCCTGATCATCAAGAAAGAAGAGACAATGTGCAGCTACGACTTCC |
| | TGATCTACGGCAAGACCCCTCTGTTCCGGGGCAACATTCTGGTGCCCGAGTCCAA |
| | GAGATGGGCCAGAGTGTCCTGCGTGTCCAACGACCAGATCGTGAATCTGGCCAAT |
| | ATCATGTCCACCGTGTCCACCAACGCTCTGACAGTGGCCCAGCACAGCCAGTCTC |
| | TGATCAAGCCTATGCGGGACTTCCTGCTCATGTCCGTGCAGGCCGTGTTCCACTA |
| | CCTGCTGTTCAGCCCTATCCTGAAGGGCAGAGTGTATAAGATCCTGAGCGCCGAG |
| | GGCGAGAGCTTCCTGCTTGCCATGAGCCGGATCATCTATCTGGACCCTAGCCTCG |
| | GCGGCATCAGCGGCATGTCTCTGGGCAGATTTCACATCCGGCAGTTCAGCGACCC |
| | TGTGTCCGAGGGCCTGTCCTTTTGGAGAGAAATCTGGCTGTCTAGCCAAGAGAGC |
| | TGGATTCACGCCCTGTGCCAAGAAGCCGGCAATCCCGATCTGGGCGAGAGAACCC |
| | TGGAATCCTTCACCAGACTGCTTGAGGACCCCACCACTCTGAACATCAGAGGCGG |
| | AGCCTCTCCAACCATCCTGCTCAAGGACGCCATCCGCAAGGCCCTGTATGACGAG |
| | GTGGACAAAGTGGAAAACAGCGAGTTCAGAGAGGCCATTCTGCTGAGCAAGACCC |
| | ACCGGGACAACTTCATCCTGTTCCTCATCTCCGTGGAACCCCTGTTTCCTAGATT |
| | CCTGTCCGAGCTGTTCTCCAGCTCCTTCCTGGGCATCCCTGAGTCCATCATCGGC |
| | CTGATCCAGAACTCCCGGACCATCCGCAGACAGTTCAGAAAGAGCCTGTCTAAGA |
| | CCCTGGAAGAGTCCTTCTACAACAGCGAAATCCACGGCATCTCCCGGATGACACA |
| | GACCCCTCAAAGAGTCGGCGGCGTCTGGCCTTGTTCTAGCGAAAGAGCCGACCTG |
| | CTGAGAGAGATCAGCTGGGGCAGAAAGGTCGTGGGCACCACAGTGCCTCATCCAA |
| | GCGAAATGCTGGGCCTCCTGCCTAAGAGCAGCATCAGCTGTACCTGTGGCGCTAC |
| | CGGCGGAGGCAATCCTAGAGTGTCTGTGTCTGTGCTGCCCAGCTTCGACCAGAGC |
| | TTCTTCAGCAGAGGACCTCTGAAGGGCTACCTGGGCTCTAGCACCAGCATGAGCA |
| | CCCAGCTGTTTCACGCCTGGGAAAAAGTGACCAATGTGCACGTGGTCAAGAGAGC |
| | CCTGTCTCTGAAAGAGAGCATCAACTGGTTCATCACGCGGGACAGCAATCTGGCA |
| | CAGGCCCTGATTCGGAACATCATGTCCCTGACTGGCCCTGACTTTCCACTGGAAG |
| | AGGCCCCTGTGTTCAAGCGCACAGGATCTGCCCTGCACAGATTCAAGAGCGCCAG |
| | ATACTCCGAAGGCGGCTACAGCTCCGTGTGTCCCAATCTGCTGTCCCACATCTCT |
| | GTGTCCACCGACACCATGTCCGATCTGACCCAGGACGGCAAGAACTACGATTTCA |
| | TGTTCCAGCCTCTCATGCTGTACGCCCAGACATGGACAAGCGAGCTGGTGCAGAG |
| | AGACACCCGGCTGAGAGATAGCACCTTCCACTGGCACCTGAGGTGCAACAGATGC |
| | GTGCGGCCCATCGACGACGTGACACTGGAAACCTCTCAGATATTCGAGTTCCCAG |
| | ACGTGTCCAAGCGGATCAGCCGAATGGTGTCTGGCGCCGTGCCTCACTTCCAAAG |
| | ACTGCCCGACATCAGACTGCGGCCAGGCGATTTTGAGAGCCTGAGCGGCAGAGAG |
| | AAGTCCCACCACATCGGATCTGCACAGGGCCTGCTCTACTCTATCCTGGTGGCCA |
| | TCCACGATTCCGGCTACAACGACGGCACCATCTTTCCCGTGAACATCTACGGAAA |
| | AGTGTCCCCACGGGACTACCTGAGAGGACTGGCTAGAGGGGTGCTGATCGGCAGC |
| | AGCATCTGCTTTCTGACCAGAATGACCAACATCAACATCAATAGGCCCCTGGAAC |
| | TGGTGTCCGGCGTGATCAGCTATATCCTGCTGCGGCTGGACAATCACCCCAGCCT |
| | GTATATCATGCTGAGGGAACCCAGCCTGCGGGGCGAGATTTTTAGCATCCCTCAG |
| | AAGATCCCTGCCGCCTATCCTACCACCATGAAGGAAGGCAATCGGAGCATCCTGT |
| | GCTACCTCCAGCATGTGCTGAGATACGAGCGGGAAATCATTACCGCCTCTCCAGA |
| | GAACGATTGGCTGTGGATCTTTAGCGACTTCCGCAGCGCCAAGATGACCTACCTG |
| | AGCCTGATCACCTACCAGAGCCATCTGCTGCTCCAGAGAGTGGAACGGAACCTGT |
| | CCAAGAGCATGAGGGACAACCTGAGGCAGCTGTCCTCTCTGATGAGACAGGTGCT |
| | CGGAGGACACGGCGAGGATACACTGGAATCTGACGACAATATCCAGCGGCTCCTG |
| | AAAGACAGCCTGAGAAGAACCAGATGGGTTGACCAAGAAGTGCGCCACGCCGCCA |
| | GAACAATGACCGGCGATTACAGCCCCAACAAGAAAGTGTCCAGAAAAGTGGGCTG |
| | CTCCGAGTGGGTCTGCTCTGCTCAGCAAGTTGCCGTGTCTACCAGCGCCAATCCT |
| | GCACCAGTTTCCGAGCTGGACATTAGAGCCCTGAGCAAACGGTTCCAGAATCCTC |
| | TGATCTCTGGCCTGAGAGTGGTGCAGTGGGCTACAGGCGCCCACTACAAGCTGAA |
| | GCCCATCCTGGACGATCTGAACGTGTTCCCTAGCCTGTGTCTGGTCGTCGGAGAT |
| | GGATCTGGCGGAATCAGCAGAGCCGTGCTGAATATGTTCCCCGACGCCAAGCTGG |
| | TGTTCAATAGCCTGCTGGAAGTGAACGATCTGATGGCCAGCGGCACACACCCTCT |
| | GCCACCAAGCGCAATTATGAGAGGCGGCAACGACATCGTGTCCAGAGTGATCGAC |
| | CTGGACTCCATCTGGGAGAAGCCCTCCGACCTGAGAAACCTGGCCACCTGGAAGT |
| | ACTTTCAGAGCGTGCAGAAACAAGTGAACATGAGCTACGACCTCATCATCTGCGA |
| | CGCCGAAGTGACCGACATTGCCTCCATCAACAGAATCACACTGCTGATGTCCGAC |
| | TTCGCTCTGAGCATCGACGGCCCTCTGTATCTGGTGTTTAAGACCTACGGCACAA |
| | TGCTCGTGAACCCTAACTACAAGGCCATCCAGCACCTCAGCAGGGCCTTTCCAAG |
| | CGTGACCGGCTTCATCACCCAAGTGACCTCCAGCTTCAGCAGCGAGCTGTATCTG |
| | CGGTTCAGCAAGCGGGGCAAGTTCTTCAGGGACGCCGAGTACCTGACCAGCAGCA |
| | CACTGAGAGAAATGAGTCTGGTGCTGTTCAACTGCTCTAGCCCCAAGAGCGAGAT |
| | GCAGAGAGCTAGAAGCCTGAACTACCAGGACCTCGTGCGGGGCTTCCCCGAAGAG |
| | ATCATCTCTAACCCCTACAACGAGATGATCATTACCCTGATCGACTCCGACGTCG |
| | AGAGCTTTCTGGTGCACAAGATGGTGGACGACCTGGAACTTCAGAGGGGCACACT |
| | GTCCAAGGTGGCCATTATCATTGCCATTATGATCGTGTTCTCCAACCGGGTTTTC |
| | AATGTCTCCAAGCCACTGACAGACCCCAGCTTCTACCCTCCTAGCGACCCAAAGA |
| | TCCTGCGGCACTTCAACATCTGTTGTAGCACCATGATGTACCTGAGCACCGCACT |
| | GGGAGATGTGCCATCCTTTGCCAGACTGCACGACCTGTATAACAGACCCATCACC |
| | TACTACTTTCGGAAGCAAGTGATCCGCGGCAACGTGTACCTGTCCTGGTCTTGGA |
| | GCAACGACACCAGCGTGTTCAAAAGAGTGGCCTGCAACAGCTCTCTGTCCCTGGC |
| | AGCAGCCACTGGATCAGACTGATCTACAAGATCGTCAAGACCACACGGCTCGTGG |
| | AGCATCAAGGATCTGAGTAGAGAGGTGGAAAGGCATCTGCATCGGTACAATCGGT |
| | GGATCACACTTGAGGACATCCGGTCCAGATCATCCCTACTAGACTACAGTTGCCT |
| | GTGA |
| SEQ ID | LDPGEVYDDPIDPIELEAEPRGTPIVPNILRNSDYNLNSPLIEDPARLMLEWLKT |
| NO: 4004 | GNRPYRMTLTDNCSRSFRVLKDYFKKVDLGSLKVGGMAAQSMISLWLYGAHSESN |
| L gene | RSRRCITDLAHFYSKSSPIEKLLNLTLGNRGLRIPPEGVLSCLERVDYDNAFGRY |
| (amino | LANTYSSYLFFHVITLYMNALDWDEEKTILALWKDLTSVDIGKDLVKFKDQIWGL |
| acid) | LIVTKDFVYSQSSNCLFDRNYTLMLKDLFLSRFNSLMVLLSPPEPRYSDDLISQL |
| | CQLYIAGDQVLSMCGNSGYEVIKILEPYVVNSLVQRAEKFRPLIHSLGDFPVFIK |
| | DKVSQLEETFGPCARRFFRALDQFDNIHDLVFVFGCYRHWGHPYIDYRKGLSKLY |
| | DQVHLKKMIDKSYQECLASDLARRILRWGFDKYSKWYLDSRFLARDHPLTPYIKT |
| | QTWPPKHIVDLVGDTWHKLPITQIFEIPESMDPSEILDDKSHSFTRTRLASWLSE |
| | NRGGPVPSEKVIITALSKPPVNPREFLRSIDLGGLPDEDLIIGLKPKERELKIEG |
| | RFFALMSWNLRLYFVITEKLLANYILPLFDALTMTDNLNKVFKKLIDRVTGQGLL |
| | DYSRVTYAFHLDYEKWNNHQRLESTEDVFSVLDQVFGLKRVFSRTHEFFQKAWIY |
| | YSDRSDLIGLREDQIYCLDASNGPTCWNGQDGGLEGLRQKGWSLVSLLMIDRESQ |
| | IRNTRTKILAQGDNQVLCPTYMLSPGLSQEGLLYELERISRNALSIYRAVEEGAS |
| | KLGLIIKKEETMCSYDFLIYGKTPLFRGNILVPESKRWARVSCVSNDQIVNLANI |
| | MSTVSTNALTVAQHSQSLIKPMRDFLLMSVQAVFHYLLFSPILKGRVYKILSAEG |
| | ESFLLAMSRIIYLDPSLGGISGMSLGRFHIRQFSDPVSEGLSFWREIWLSSQESW |
| | IHALCQEAGNPDLGERTLESFTRLLEDPTTLNIRGGASPTILLKDAIRKALYDEV |
| | DKVENSEFREAILLSKTHRDNFILFLISVEPLFPRFLSELFSSSFLGIPESIIGL |
| | IQNSRTIRRQFRKSLSKTLEESFYNSEIHGISRMTQTPQRVGGVWPCSSERADLL |
| | REISWGRKVVGTTVPHPSEMLGLLPKSSISCTCGATGGGNPRVSVSVLPSFDQSF |
| | FSRGPLKGYLGSSTSMSTQLFHAWEKVTNVHVVKRALSLKESINWFITRDSNLAQ |
| | ALIRNIMSLTGPDFPLEEAPVFKRTGSALHRFKSARYSEGGYSSVCPNLLSHISV |
| | STDTMSDLTQDGKNYDFMFQPLMLYAQTWTSELVQRDTRLRDSTFHWHLRCNRCV |
| | RPIDDVTLETSQIFEFPDVSKRISRMVSGAVPHFQRLPDIRLRPGDFESLSGREK |
| | SHHIGSAQGLLYSILVAIHDSGYNDGTIFPVNIYGKVSPRDYLRGLARGVLIGSS |
| | ICFLTRMTNININRPLELVSGVISYILLRLDNHPSLYIMLREPSLRGEIFSIPQK |
| | IPAAYPTTMKEGNRSILCYLQHVLRYEREIITASPENDWLWIFSDFRSAKMTYLS |
| | LITYQSHLLLQRVERNLSKSMRDNLRQLSSLMRQVLGGHGEDTLESDDNIQRLLK |
| | DSLRRTRWVDQEVRHAARTMTGDYSPNKKVSRKVGCSEWVCSAQQVAVSTSANPA |
| | PVSELDIRALSKRFQNPLISGLRVVQWATGAHYKLKPILDDLNVFPSLCLVVGDG |
| | SGGISRAVLNMFPDAKLVFNSLLEVNDLMASGTHPLPPSAIMRGGNDIVSRVIDL |
| | DSIWEKPSDLRNLATWKYFQSVQKQVNMSYDLIICDAEVTDIASINRITLLMSDF |
| | ALSIDGPLYLVFKTYGTMLVNPNYKAIQHLSRAFPSVTGFITQVTSSFSSELYLR |
| | FSKRGKFFRDAEYLTSSTLREMSLVLFNCSSPKSEMQRARSLNYQDLVRGFPEEI |
| | ISNPYNEMIITLIDSDVESFLVHKMVDDLELQRGTLSKVAIIIAIMIVFSNRVFN |
| | VSKPLTDPSFYPPSDPKILRHFNICCSTMMYLSTALGDVPSFARLHDLYNRPITY |
| | YFRKQVIRGNVYLSWSWSNDTSVFKRVACNSSLSLSSHWIRLIYKIVKTTRLVGS |
| | IKDLSREVERHLHRYNRWITLEDIRSRSSLLDYSCL |
| SEQ ID | ttctagaagcagagaggaatctttgtcctcttcggacctttgtgtctgaagagac |
| NO: 4005 | atgtcagaccatagttgacatgctctcgggttcatgttgatacaccagactctgc |
| M gene | cctggatatgacactgttttgcaatcactcttatttgcaatccgacgaactcagt |
| (nucleic | atcatcatcccaagtgatctcctgagagtattccaactcctccccttcaagaggg |
| acid) | cccctggaatcagcccactggaagataaaggttctcctcaatttgtatacccagt |
| | tcaggccctcagggactggagatcctgacaaagccagtccaataaccactttgac |
| | taacccgatcatcctatgattcccagaatatatctcgtcgaatgatttcagaatg |
| | tgccgcaggatcctgaacgagtaaccattcgggctacacactttaacccttccgt |
| | tgatacaaaagttcctcatgttcttcttgcctgtaagttctttcagcgggacgta |
| | ttcagggggtggaagccacaagtcatcgtcatccagaggggctgacgcgggagag |
| | gatttttgagtgtcctcgtccctgcggtttttcactatcttacgtaggaggtt |
| SEQ ID | ATGAACCTGCTGCGGAAGATCGTGAAGAATCGGCGCGACGAGGACACCCAGAAGT |
| NO: 4023 | CTAGCCCTGCTTCTGCCCCTCTGGACGACGATGATCTGTGGCTGCCTCCTCCAGA |
| M gene | GTACGTGCCCCTGAAAGAGCTGACCGGCAAAAAGAACATGCGGAATTTCTGCATC |
| codon | AACGGCCGCGTGAAAGTGTGCAGCCCCAACGGCTACAGCTTCAGAATCCTGCGGC |
| optimized | ACATCCTGAAGTCCTTCGACGAAATCTACAGCGGCAACCACCGGATGATCGGCCT |
| (nucleic | GGTCAAGGTTGTGATTGGACTGGCCCTGAGCGGCTCTCCTGTTCCTGAAGGCCTG |
| acid) | AACTGGGTCTACAAGCTGCGGCGGACATTCATTTTTCAGTGGGCCGACAGCAGAG |
| | GCCCTCTGGAAGGCGAGGAACTGGAATACTCCCAAGAGATCACCTGGGACGACGA |
| | CACCGAGTTTGTGGGCCTGCAGATCAGAGTGATCGCCAAGCAGTGCCACATCCAG |
| | GGCAGAGTGTGGTGCATCAACATGAACCCCAGAGCCTGCCAGCTTTGGAGCGACA |
| | TGTCTCTGCAGACCCAGCGGAGCGAAGAGGACAAGGATtcctctctgcttctaga |
| | ataa |
| SEQ ID | NLLRKIVKNRRDEDTQKSSPASAPLDDDDLWLPPPEYVPLKELTGKKNMRNFCIN |
| NO: 4006 | GRVKVCSPNGYSFRILRHILKSFDEIYSGNHRMIGLVKVVIGLALSGSPVPEGLN |
| M gene | WVYKLRRTFIFQWADSRGPLEGEELEYSQEITWDDDTEFVGLQIRVIAKQCHIQG |
| (amino | RVWCINMNPRACQLWSDMSLQTQRSEEDKDSSLLLE |
| acid) | |
| SEQ ID | agcaagatctttgtcaatcctagtgctattagagccggtctggccgatcttgaga |
| NO: 4007 | tggctgaagaaactgttgatctgatcaatagaaatatcgaagacaatcaggctca |
| P gene | tctccaaggggaacccatagaggtggacaatctccctgaggatatggggcgactt |
| (nucleic | cacctggatgatggaaaatcgcccaaccatggtgagatagccaaggtgggagaag |
| acid) | gcaagtatcgagaggactttcagatggatgaaggagaggatcctagettcctgtt |
| | ccagtcatacctggaaaatgttggagtccaaatagtcagacaaatgaggtcagga |
| | gagagatttctcaagatatggtcacagaccgtagaagagattatatcctatgtcg |
| | cggtcaactttcccaaccctccaggaaagtettcagaggataaatcaacccagac |
| | tactggccgagagctcaagaaggagacaacacccactccttctcagagagaaagc |
| | caatcatcgaaagccaggatggeggctcaaattgcttctggccctccagcccttg |
| | aatggteggctaccaatgaagaggatgatctatcagtggaggctgagatcgctca |
| | ccagattgcagaaagtttctccaaaaaatataagtttccctctcgatcctcaggg |
| | atactcttgtataattttgagcaattgaaaatgaaccttgatgatatagttaaag |
| | aggcaaaaaatgtaccaggtgtgacccgtttagcccatgacgggtccaaactccc |
| | cctaagatgtgtactgggatgggtcgctttggccaactctaagaaattccagttg |
| | ttagtcgaatccgacaagctgagtaaaatcatgcaagatgacttgaatcgctata |
| | catcttgc |
| SEQ ID | ATGAGCAAGATCTTTGTCAATCCTAGTGCTATCAGAGCCGGCCTGGCTGATCTTG |
| NO: 4015 | AGATGGCCGAGGAAACCGTGGACCTGATCAACCGGAACATCGAGGACAATCAGGC |
| P gene | CCATCTGCAGGGCGAGCCTATCGAGGTTGACAATCTGCCCGAGGACATGGGCAGA |
| codon | CTGCACCTGGATGATGGCAAGAGCCCTAACCACGGCGAGATCGCCAAAGTTGGCG |
| optimized | AGGGCAAGTACCGCGAGGACTTCCAGATGGACGAGGGCGAAGATCCCAGCTTCCT |
| (nucleic | GTTCCAGTCCTACCTGGAAAACGTGGGCGTGCAGATCGTGCGGCAGATGAGAAGC |
| acid) | GGCGAGCGGTTCCTGAAGATTTGGAGCCAGACCGTGGAAGAGATCATCAGCTACG |
| | TGGCCGTGAACTTCCCCAATCCTCCAGGCAAGAGCAGCGAGGACAAGAGCACACA |
| | GACCACCGGCAGAGAGCTGAAGAAAGAGACAACCCCTACACCTAGCCAGAGAGAG |
| | AGCCAGAGCAGCAAGGCCAGAATGGCCGCTCAGATTGCCTCTGGACCTCCAGCTC |
| | TTGAGTGGAGCGCCACCAACGAAGAGGACGACCTGTCTGTGGAAGCCGAGATTGC |
| | CCACCAGATCGCCGAGAGCTTCAGCAAGAAGTACAAGTTCCCCAGCAGAAGCAGC |
| | GGCATCCTGCTGTATAACTTCGAGCAGCTGAAGATGAACCTGGACGACATCGTGA |
| | AAGAGGCCAAGAACGTCCCCGGCGTGACAAGACTGGCCCACGATGGATCTAAGCT |
| | GCCCCTGAGATGTGTGCTCGGATGGGTTGCCCTGGCCAATAGCAAGAAATTCCAG |
| | CTGCTGGTGGAAAGCGACAAGCTGTCCAAGATCATGCAGGATGACTTGAATCGCT |
| | ATACATCTTGCTAA |
| SEQ ID | SKIFVNPSAIRAGLADLEMAEETVDLINRNIEDNQAHLQGEPIEVDNLPEDMGRL |
| NO: 4008 | HLDDGKSPNHGEIAKVGEGKYREDFQMDEGEDPSFLFQSYLENVGVQIVRQMRSG |
| P gene | ERFLKIWSQTVEEIISYVAVNFPNPPGKSSEDKSTQTTGRELKKETTPTPSQRES |
| (amino | QSSKARMAAQIASGPPALEWSATNEEDDLSVEAEIAHQIAESFSKKYKFPSRSSG |
| acid) | ILLYNFEQLKMNLDDIVKEAKNVPGVTRLAHDGSKLPLRCVLGWVALANSKKFQL |
| | LVESDKLSKIMQDDLNRYTSC |
| SEQ ID | atggttcctcaggctctcctgtttgtaccccttctggtttttccattgtgttttg |
| NO: 4009 | ggaaattccctatttacacgataccagacaagcttggtccctggagtccgattga |
| G gene | catacatcacctcagctgcccaaacaatttggtagtggaggacgaaggatgcacc |
| (nucleic | aacctgtcagggttctcctacatggaacttaaagttggatacatcttagccataa |
| acid) | aagtgaacgggttcacttgcacaggcgttgtgacggaggctgaaacctacactaa |
| | cttcgttggttatgtcacaaccacgttcaaaagaaagcatttccgcccaacacca |
| | gatgcatgtagagccgcgtacaactggaagatggccggtgaccccagatatgaag |
| | agtctctacacaatccgtaccctgactaccgctggcttcgaactgtaaaaaccac |
| | caaggagtctctcgttatcatatctccaagtgtggcagatttggacccatatgac |
| | agatcccttcactcgagggtcttccctagcgggaagtgctcaggagtagaggtgt |
| | cttctacctactgctccactaaccacgattacaccatttggatgcccgagaatcc |
| | gagactagggatgtcttgtgacatttttaccaatagtagagggaagagagcatcc |
| | aaagggagtgagacttgcggctttgtagatgaaagaggcctatataagtctttaa |
| | aaggagcatgcaaactcaagttatgtggagttctaggacttagacttatggatgg |
| | aacatgggtctcgatgcaaacatcaaatgaaaccaaatggtgccctcccgataag |
| | ttggtgaacctgcacgactttcgctcagacgaaattgagcaccttgttgtagagg |
| | agttggtcaggaagagagaggagtgtctggatgcactagagtccatcatgacaac |
| | caagtcagtgagtttcagacgtctcagtcatttaagaaaacttgtccctgggttt |
| | ggaaaagcatataccatattcaacaagaccttgatggaagccgatgctcactaca |
| | agtcagtcagaacttggaatgagatcctcccttcaaaagggtgtttaagagttgg |
| | ggggaggtgtcatcctcatgtgaacggggtgtttttcaatggtataatattagga |
| | cctgacggcaatgtcttaatcccagagatgcaatcatccctcctccagcaacata |
| | tggagttgttggaatcctcggttatcccccttgtgcaccccctggcagacccgtc |
| | taccgttttcaaggacggtgacgaggctgaggattttgttgaagttcaccttccc |
| | gatgtgcacaatcaggtctcaggagttgacttgggtctcccgaactgggggaagt |
| | atgtattactgagtgcaggggccctgactgccttgatgttgataattttcctgat |
| | gacatgttgtagaagagtcaatcgatcagaacctacgcaacacaatctcagaggg |
| | acagggagggaggtgtcagtcactccccaaagcgggaagatcatatcttcatggg |
| | aatcacacaagagtgggggtgagaccagactg |
| SEQ ID | ATGGTTCCTCAGGCTCTGCTGTTCGTGCCCCTGCTGGTGTTCCCTCTGTGCTTCG |
| NO: 4016 | GCAAGTTCCCCATCTACACAATCCCCGACAAGCTCGGCCCTTGGAGCCCTATCGA |
| G gene | TATTCACCACCTGAGCTGCCCCAACAACCTGGTGGTGGAAGATGAGGGCTGCACC |
| codon | AACCTGAGCGGCTTCAGCTACATGGAACTGAAAGTGGGCTACATCCTGGCCATCA |
| optimized | AAGTGAACGGCTTCACCTGTACCGGCGTCGTGACAGAGGCCGAGACATACACCAA |
| (nucleic | CTTCGTGGGCTACGTGACCACCACCTTCAAGCGGAAGCACTTCAGACCCACACCT |
| acid) | GACGCCTGTAGAGCCGCCTACAACTGGAAAATGGCCGGCGATCCCAGATACGAGG |
| | AAAGCCTGCACAACCCCTATCCTGACTACAGATGGCTGAGAACCGTGAAAACCAC |
| | CAAAGAGAGCCTGGTCATCATCAGCCCCAGCGTGGCCGATCTGGACCCCTATGAT |
| | AGATCCCTGCACAGCAGAGTGTTCCCCAGCGGCAAATGTTCTGGCGTGGCCGTGT |
| | CTAGCACCTACTGCTCCACCAACCACGACTACACCATCTGGATGCCCGAGAATCC |
| | CAGACTGGGCATGAGCTGCGACATCTTCACCAACAGCCGGGGCAAGAGAGCCAGC |
| | AAGGGCTCTGAGACATGCGGCTTCGTGGACGAGAGGGGCCTGTATAAGTCTCTGA |
| | AGGGCGCCTGCAAGCTGAAGCTGTGCGGAGTTCTGGGCCTGAGACTGATGGATGG |
| | CACCTGGGTGTCCATGCAGACCAGCAACGAGACAAAGTGGTGCCCTCCTGACAAG |
| | CTGGTCAACCTGCACGACTTCAGAAGCGACGAGATCGAGCATCTGGTGGTCGAGG |
| | AACTCGTGCGGAAGAGGGAAGAATGCCTGGACGCCCTGGAATCCATTATGACCAC |
| | CAAGAGCGTGTCCTTCCGGCGGCTGTCTCACCTGAGAAAACTGGTGCCCGGCTTT |
| | GGCAAGGCTTACACAATCTTCAACAAGACCCTGATGGAAGCCGACGCTCACTACA |
| | AGTCTGTGCGGACCTGGAACGAGATCCTGCCTTCCAAGGGCTGCCTGAGAGTTGG |
| | CGGAAGATGTCACCCTCACGTGAACGGCGTGTTCTTCAACGGCATCATCCTGGGA |
| | CCTGACGGCAACGTGCTGATCCCTGAGATGCAGTCTAGCCTGCTCCAGCAACACA |
| | TGGAATTGCTGGAAAGCAGCGTGATCCCTCTGGTGCACCCTCTGGCCGATCCTAG |
| | CACCGTGTTTAAGGATGGCGACGAGGCCGAGGACTTCGTGGAAGTGCATCTGCCC |
| | GACGTGCACAATCAGGTGTCAGGCGTTGACCTGGGCCTGCCTAACTGGGGCAAAT |
| | ACGTGCTGCTTTCTGCCGGCGCTCTGACAGCCCTGATGCTGATCATCTTCCTGAT |
| | GACCTGCTGTCGGAGAGTGAACAGAAGCGAGCCCACACAGCACAACCTGAGAGGC |
| | ACAGGCAGAGAAGTGTCCGTGACACCTCAGAGCGGCAAGATCATCAGCAGCTGGG |
| | AGAGCCACAAGAGCGGCGGAGAAACAAGACTgTAA |
| SEQ ID | MVPQALLFVPLLVFPLCFGKFPIYTIPDKLGPWSPIDIHHLSCPNNLVVEDEGCT |
| NO: 4010 | NLSGFSYMELKVGYILAIKVNGFTCTGVVTEAETYTNFVGYVTTTFKRKHFRPTP |
| G gene | DACRAAYNWKMAGDPRYEESLHNPYPDYRWLRTVKTTKESLVIISPSVADLDPYD |
| (amino | RSLHSRVFPSGKCSGVAVSSTYCSTNHDYTIWMPENPRLGMSCDIFTNSRGKRAS |
| acid) | KGSETCGFVDERGLYKSLKGACKLKLCGVLGLRLMDGTWVSMQTSNETKWCPPDK |
| | LVNLHDFRSDEIEHLVVEELVRKREECLDALESIMTTKSVSFRRLSHLRKLVPGF |
| | GKAYTIFNKTLMEADAHYKSVRTWNEILPSKGCLRVGGRCHPHVNGVFFNGIILG |
| | PDGNVLIPEMQSSLLQQHMELLESSVIPLVHPLADPSTVFKDGDEAEDFVEVHLP |
| | DVHNQVSGVDLGLPNWGKYVLLSAGALTALMLIIFLMTCCRRVNRSEPTQHNLRG |
| | TGREVSVTPQSGKIISSWESHKSGGETRL |

[0225] In certain embodiments, the recombinant rabies virus genome comprises an N gene having a nucleic acid sequence that is about 60%, about 65%, about 70%, about 75%, about 80%, about 81%, about 82%, about 83%, about 84%, about 85%, about 86%, about 87%, about 88%, about 89%, about 90%, about 91%, about 92%, about 93%, about 94%, about 95%, about 96%, about 97%, about 98%, about 99% identical to the nucleic acid sequence set forth in SEQ ID NO: 4001. In certain embodiments, the recombinant rabies virus genome comprises an N gene having a nucleic acid sequence that is at least 60%, at least 65%, about 70%, at least 75%, at least 80%, at least 81%, at least 82%, at least 83%, at least 84%, at least 85%, at least 86%, at least 87%, at least 88%, at least 89%, at least 90%, at least 91%, at least 92%, at least 93%, at least 94%, at least 95%, at least 96%, at least 97%, at least 98%, at least 99% identical to the nucleic acid sequence set forth in SEQ ID NO: 4001. In certain embodiments, the recombinant rabies virus genome comprises an N gene comprising the nucleic acid sequence set forth in SEQ ID NO: 4001. In certain embodiments, the recombinant rabies virus genome comprises an N gene consisting of the nucleic acid sequence set forth in SEQ ID NO: 4001. In certain embodiments, the N gene encodes for an amino acid sequence that is about 80%, about 81%, about 82%, about 83%, about 84%, about 85%, about 86%, about 87%, about 88%, about 89%, about 90%, about 91%, about 92%, about 93%, about 94%, about 95%, about 96%, about 97%, about 98%, about 99% identical to the amino acid sequence set forth in SEQ ID NO: 4002. In certain embodiments, the N gene encodes for an amino acid sequence that is at least 80%, at least 81%, at least 82%, at least 83%, at least 84%, at least 85%, at least 86%, at least 87%, at least 88%, at least 89%, at least 90%, at least 91%, at least 92%, at least 93%, at least 94%, at least 95%, at least 96%, at least 97%, at least 98%, at least 99% identical to the amino acid sequence set forth in SEQ ID NO: 4002. In certain embodiments, the N gene encodes for an amino acid sequence comprising the amino acid sequence set forth in SEQ ID NO: 4002. In certain embodiments, the N gene encodes for an amino acid sequence consisting of the amino acid sequence set forth in SEQ ID NO: 4002.

[0226] In certain embodiments, the recombinant rabies virus genome comprises an L gene having a nucleic acid sequence that is about 60%, about 65%, about 70%, about 75%, about 80%, about 81%, about 82%, about 83%, about 84%, about 85%, about 86%, about 87%, about 88%, about 89%, about 90%, about 91%, about 92%, about 93%, about 94%, about 95%, about 96%, about 97%, about 98%, about 99% identical to the nucleic acid sequence set forth in SEQ ID NO: 4003. In certain embodiments, the recombinant rabies virus genome comprises an L gene having a nucleic acid sequence that is at least 60%, at least 65%, about 70%, at least 75%, at least 80%, at least 81%, at least 82%, at least 83%, at least 84%, at least 85%, at least 86%, at least 87%, at least 88%, at least 89%, at least 90%, at least 91%, at least 92%, at least 93%, at least 94%, at least 95%, at least 96%, at least 97%, at least 98%, at least 99% identical to the nucleic acid sequence set forth in SEQ ID NO: 4003. In certain embodiments, the recombinant rabies virus genome comprises an L gene comprising the nucleic acid sequence set forth in SEQ ID NO: 4003. In certain embodiments, the recombinant rabies virus genome comprises an L gene consisting of the nucleic acid sequence set forth in SEQ ID NO: 4003. In certain embodiments, the L gene encodes for an amino acid sequence that is about 80%, about 81%, about 82%, about 83%, about 84%, about 85%, about 86%, about 87%, about 88%, about 89%, about 90%, about 91%, about 92%, about 93%, about 94%, about 95%, about 96%, about 97%, about 98%, about 99% identical to the amino acid sequence set forth in SEQ ID NO: 4004. In certain embodiments, the L gene encodes for an amino acid sequence that is at least 80%, at least 81%, at least 82%, at least 83%, at least 84%, at least 85%, at least 86%, at least 87%, at least 88%, at least 89%, at least 90%, at least 91%, at least 92%, at least 93%, at least 94%, at least 95%, at least 96%, at least 97%, at least 98%, at least 99% identical to the amino acid sequence set forth in SEQ ID NO: 4004. In certain embodiments, the L gene encodes for an amino acid sequence comprising the amino acid sequence set forth in SEQ ID NO: 4004. In certain embodiments, the L gene encodes for an amino acid sequence consisting of the amino acid sequence set forth in SEQ ID NO: 4004.

[0227] In certain embodiments, the recombinant rabies virus genome comprises an M gene having a nucleic acid sequence that is about 60%, about 65%, about 70%, about 75%, about 80%, about 81%, about 82%, about 83%, about 84%, about 85%, about 86%, about 87%, about 88%, about 89%, about 90%, about 91%, about 92%, about 93%, about 94%, about 95%, about 96%, about 97%, about 98%, about 99% identical to the nucleic acid sequence set forth in SEQ ID NO: 4005. In certain embodiments, the recombinant rabies virus genome comprises an M gene having a nucleic acid sequence that is at least 60%, at least 65%, about 70%, at least 75%, at least 80%, at least 81%, at least 82%, at least 83%, at least 84%, at least 85%, at least 86%, at least 87%, at least 88%, at least 89%, at least 90%, at least 91%, at least 92%, at least 93%, at least 94%, at least 95%, at least 96%, at least 97%, at least 98%, at least 99% identical to the nucleic acid sequence set forth in SEQ ID NO: 4005. In certain embodiments, the recombinant rabies virus genome comprises an M gene comprising the nucleic acid sequence set forth in SEQ ID NO: 4005. In certain embodiments, the recombinant rabies virus genome comprises an M gene consisting of the nucleic acid sequence set forth in SEQ ID NO: 4005. In certain embodiments, the M gene encodes for an amino acid sequence that is about 80%, about 81%, about 82%, about 83%, about 84%, about 85%, about 86%, about 87%, about 88%, about 89%, about 90%, about 91%, about 92%, about 93%, about 94%, about 95%, about 96%, about 97%, about 98%, about 99% identical to the amino acid sequence set forth in SEQ ID NO: 4006. In certain embodiments, the M gene encodes for an amino acid sequence that is at least 80%, at least 81%, at least 82%, at least 83%, at least 84%, at least 85%, at least 86%, at least 87%, at least 88%, at least 89%, at least 90%, at least 91%, at least 92%, at least 93%, at least 94%, at least 95%, at least 96%, at least 97%, at least 98%, at least 99% identical to the amino acid sequence set forth in SEQ ID NO: 4006. In certain embodiments, the M gene encodes for an amino acid sequence comprising the amino acid sequence set forth in SEQ ID NO: 4006. In certain embodiments, the M gene encodes for an amino acid sequence consisting of the amino acid sequence set forth in SEQ ID NO: 4006.

[0228] In certain embodiments, the recombinant rabies virus genome comprises a P gene having a nucleic acid sequence that is about 60%, about 65%, about 70%, about 75%, about 80%, about 81%, about 82%, about 83%, about 84%, about 85%, about 86%, about 87%, about 88%, about 89%, about 90%, about 91%, about 92%, about 93%, about 94%, about 95%, about 96%, about 97%, about 98%, about 99% identical to the nucleic acid sequence set forth in SEQ ID NO: 4007. In certain embodiments, the recombinant rabies virus genome comprises a P gene having a nucleic acid sequence that is at least 60%, at least 65%, about 70%, at least 75%, at least 80%, at least 81%, at least 82%, at least 83%, at least 84%, at least 85%, at least 86%, at least 87%, at least 88%, at least 89%, at least 90%, at least 91%, at least 92%, at least 93%, at least 94%, at least 95%, at least 96%, at least 97%, at least 98%, at least 99% identical to the nucleic acid sequence set forth in SEQ ID NO: 4007. In certain embodiments, the recombinant rabies virus genome comprises a P gene comprising the nucleic acid sequence set forth in SEQ ID NO: 4007. In certain embodiments, the recombinant rabies virus genome comprises a P gene consisting of the nucleic acid sequence set forth in SEQ ID NO: 4007. In certain embodiments, the P gene encodes for an amino acid sequence that is about 80%, about 81%, about 82%, about 83%, about 84%, about 85%, about 86%, about 87%, about 88%, about 89%, about 90%, about 91%, about 92%, about 93%, about 94%, about 95%, about 96%, about 97%, about 98%, about 99% identical to the amino acid sequence set forth in SEQ ID NO: 4008. In certain embodiments, the P gene encodes for an amino acid sequence that is at least 80%, at least 81%, at least 82%, at least 83%, at least 84%, at least 85%, at least 86%, at least 87%, at least 88%, at least 89%, at least 90%, at least 91%, at least 92%, at least 93%, at least 94%, at least 95%, at least 96%, at least 97%, at least 98%, at least 99% identical to the amino acid sequence set forth in SEQ ID NO: 4008. In certain embodiments, the P gene encodes for an amino acid sequence comprising the amino acid sequence set forth in SEQ ID NO: 4008. In certain embodiments, the P gene encodes for an amino acid sequence consisting of the amino acid sequence set forth in SEQ ID NO: 4008.

[0229] In certain embodiments, the recombinant rabies virus genome comprises a G gene having a nucleic acid sequence that is about 60%, about 65%, about 70%, about 75%, about 80%, about 81%, about 82%, about 83%, about 84%, about 85%, about 86%, about 87%, about 88%, about 89%, about 90%, about 91%, about 92%, about 93%, about 94%, about 95%, about 96%, about 97%, about 98%, about 99% identical to the nucleic acid sequence set forth in SEQ ID NO: 4009. In certain embodiments, the recombinant rabies virus genome comprises a G gene having a nucleic acid sequence that is at least 60%, at least 65%, about 70%, at least 75%, at least 80%, at least 81%, at least 82%, at least 83%, at least 84%, at least 85%, at least 86%, at least 87%, at least 88%, at least 89%, at least 90%, at least 91%, at least 92%, at least 93%, at least 94%, at least 95%, at least 96%, at least 97%, at least 98%, at least 99% identical to the nucleic acid sequence set forth in SEQ ID NO: 4009. In certain embodiments, the recombinant rabies virus genome comprises a G gene comprising the nucleic acid sequence set forth in SEQ ID NO: 4009. In certain embodiments, the recombinant rabies virus genome comprises a G gene consisting of the nucleic acid sequence set forth in SEQ ID NO: 4009. In certain embodiments, the G gene encodes for an amino acid sequence that is about 80%, about 81%, about 82%, about 83%, about 84%, about 85%, about 86%, about 87%, about 88%, about 89%, about 90%, about 91%, about 92%, about 93%, about 94%, about 95%, about 96%, about 97%, about 98%, about 99% identical to the amino acid sequence set forth in SEQ ID NO: 4010. In certain embodiments, the G gene encodes for an amino acid sequence that is at least 80%, at least 81%, at least 82%, at least 83%, at least 84%, at least 85%, at least 86%, at least 87%, at least 88%, at least 89%, at least 90%, at least 91%, at least 92%, at least 93%, at least 94%, at least 95%, at least 96%, at least 97%, at least 98%, at least 99% identical to the amino acid sequence set forth in SEQ ID NO: 4010. In certain embodiments, the G gene encodes for an amino acid sequence comprising the amino acid sequence set forth in SEQ ID NO: 4010. In certain embodiments, the G gene encodes for an amino acid sequence consisting of the amino acid sequence set forth in SEQ ID NO: 4010.

[0230] Each of the genes comprised within a recombinant rabies virus genome of the present disclosure may be operably linked to a transcriptional regulatory element. In certain embodiments, wherein the genes are linked on a single expression cassette, a single transcriptional regulatory element may be capable of controlling the expression of the genes. In certain embodiments, each gene is operably linked to a separate transcriptional regulatory element. In certain embodiments, the transcriptional regulatory elements for each gene may be the same. In certain embodiments, the transcriptional regulatory elements for each gene may be different.

[0231] In certain embodiments, each of the genes are operably linked to a transcriptional regulatory element, wherein the transcriptional regulatory element is capable of controlling the expression of the gene that is operably linked thereto. In certain embodiments, the transcriptional regulatory element comprises a transcription initiation signal. The transcription initiation signal can be endogenous or exogenous to the rabies virus. In certain embodiments, the transcription initiation signal is a synthetic transcription initiation signal. In certain embodiments, the nucleic acid encoding a transgene is further operably linked to a transcription termination polyadenylation signal. The transcription termination polyadenylation signal can be endogenous or exogenous to the rabies virus. In certain embodiments, the transcription termination polyadenylation signal is a synthetic transcription termination polyadenylation signal. Examples of suitable transcription initiation signals and transcriptional termination polyadenylaton signals are known to those of ordinary skill in the art, and are described in, e.g., Albertini et al., Adv. Virus. Res. (2011) 79: 1-22; Ogino and Green, Viruses (2019) 11(6): 504; Ogino et al., Nucl. Acids. Res. (2019) 47(1): 299-309; and Ogino and Green, Front. Microbiol. (2019) 10: 1490, the disclosures of which are herein incorporated by reference in their entireties.

[0232] In certain embodiments, the recombinant rabies virus is replication incompetent. As used herein, the term “replication incompetent” refers to a virus that is incapable of completing a full replication cycle in a host cell after infection. In general, viruses may be rendered replication incompetent through the deletion or inactivation of viral genes necessary for viral replication. In certain embodiments, the recombinant rabies virus is rendered replication incompetent through the deletion or inactivation of any one or more of the P gene, the L gene, the M gene, the N gene, and the G gene, in the recombinant rabies virus genome. In other embodiments, the recombinant rabies virus is replication deficient. As used herein, the term “replication deficient” refers to a modified virus that is capable of completing a full replication cycle in a host cell after infection less efficiently compared to a wild-type or unmodified virus.

### C. GUIDE RNA & RECOMBINANT RECOMBINANT RABIES VIRUS GENOMES ENCODING THE SAME

[0233] In one aspect, the disclosure provides a recombinant rabies virus genome, comprising a nucleic acid encoding a first guide RNA (gRNA) that comprises a 5′ end and a 3′ end; and a nucleic acid encoding a first transfer RNA (tRNA) positioned at one of both of upstream of the 5′ end of the nucleic acid encoding the first gRNA or downstream of the 3′ end of the nucleic acid encoding the first gRNA.

[0234] In certain embodiments, the recombinant rabies virus genome comprises a nucleic acid encoding a second tRNA. In certain embodiments, the recombinant rabies virus genome comprises a nucleic acid encoding a third tRNA. In certain embodiments, the recombinant rabies virus genome comprises a nucleic acid encoding a fourth tRNA. In certain embodiments, the recombinant rabies virus genome comprises a nucleic acid encoding a fifth tRNA.

[0235] In certain embodiments, the nucleic acid encoding the first tRNA is positioned upstream of the 5′ end of the nucleic acid encoding the first gRNA; and the nucleic acid encoding the second tRNA is positioned downstream of the 3′ end of the nucleic acid encoding the first gRNA.

[0236] In certain embodiments, the nucleotide sequence of the first tRNA and the nucleotide sequence of the second tRNA, third tRNA, fourth tRNA, and/or fifth tRNA are at least 90%, 91%, 92%, 93%, 94%, 95%, 96%, 97%, 98%, 99%, or 100% identical.

[0237] In certain embodiments, the first tRNA and the second tRNA, third tRNA, fourth tRNA, and/or fifth tRNA specify the same amino acid. For example, the first tRNA and the second tRNA possess different anti-codon loop sequences, each anti-codon loop sequence corresponding to the same amino acid (e.g., a first tRNA with an anti-codon loop sequence comprising 5′ GGC 3′ specifying Ala, and a second tRNA with an anti-codon loop sequence comprising 5′ AGC 3′, also specifying Ala).

[0238] In certain embodiments, the first tRNA and the second tRNA, third tRNA, fourth tRNA, and/or fifth tRNA specify different amino acids. For example, the first tRNA and the second tRNA possess different anti-codon loop sequences, each anti-codon loop sequence corresponding to different amino acids (e.g., a first tRNA with an anti-codon loop sequence comprising 5′ GGC 3′ specifying Ala, and a second tRNA with an anti-codon loop sequence comprising 5′ AAA 3′, specifying Phe).

[0239] In certain embodiments, the recombinant rabies virus genome comprises two or more nucleic acids encoding the first tRNA, second tRNA, third tRNA, fourth tRNA, and/or fifth tRNA. In certain embodiments, the recombinant rabies virus genome comprises two nucleic acids encoding the first tRNA, second tRNA, third tRNA, fourth tRNA, and/or fifth tRNA. In certain embodiments, the recombinant rabies virus genome comprises three nucleic acids encoding the first tRNA, second tRNA, third tRNA, fourth tRNA, and/or fifth tRNA. In certain embodiments, the recombinant rabies virus genome comprises four nucleic acids encoding the first tRNA, second tRNA, third tRNA, fourth tRNA, and/or fifth tRNA. In certain embodiments, the recombinant rabies virus genome comprises five nucleic acids encoding the first tRNA, second tRNA, third tRNA, fourth tRNA, and/or fifth tRNA.

[0240] In certain embodiments, the recombinant rabies virus genome comprises a nucleic acid encoding a second gRNA, a third gRNA, a fourth gRNA, and/or a fifth gRNA.

[0241] In certain embodiments, the two or more nucleic acids encode identical gRNA. In certain embodiments, the two or more nucleic acids encode at least one different gRNA. In certain embodiments, the nucleotide sequence of the first gRNA and the nucleotide sequence of the second gRNA, a third gRNA, a fourth gRNA, and/or a fifth gRNA are at least 90%, 91%, 92%, 93%, 94%, 95%, 96%, 97%, 98%, 99%, or 100% identical.

[0242] In certain embodiments, the first gRNA and the second gRNA, a third gRNA, a fourth gRNA, and/or a fifth gRNA specifically hybridize to the same target nucleic acid sequence. In certain embodiments, the first gRNA and the second gRNA, a third gRNA, a fourth gRNA, and/or a fifth gRNA specifically hybridize to different target nucleic acid sequence.

[0243] In certain embodiments, the first tRNA, second tRNA, third tRNA, fourth tRNA, and/or fifth tRNA is each selected from the group consisting of: tRNA-ala, tRNA-arg, tRNA-asn, tRNA-asp, tRNA-cys, tRNA-gln, tRNA-gly, tRNA-his, tRNA-ile, tRNA-leu, tRNA-lys, tRNA-met, tRNA-phe, tRNA-pro, tRNA-pyl, tRNA-sec, tRNA-ser, tRNA-thr, tRNA-trp, tRNA-tyr, and tRNA-val.

[0244] In certain embodiments, the recombinant rabies virus genome comprises a nucleic acid encoding a negative-strand RNA virus gene.

[0245] In certain embodiments, the recombinant rabies virus genome comprises a nucleic acid encoding a transgene (e.g., a nucleobase editor).

[0246] In certain embodiments, the nucleic acid encoding the first gRNA and the nucleic acid encoding the first tRNA are positioned between two nucleic acids each encoding a negative-strand RNA virus gene.

[0247] In certain embodiments, the nucleic acid encoding the first gRNA and the nucleic acid encoding the first tRNA are positioned between two nucleic acids each encoding a transgene.

[0248] In certain embodiments, the nucleic acid encoding the first gRNA and the nucleic acid encoding the first tRNA are positioned between a nucleic acid encoding a negative-strand RNA virus gene and a nucleic acid encoding a transgene.

[0249] In certain embodiments, the recombinant rabies virus genome comprises a gRNA expression cassette comprising, from 5′ to 3′, a negative-strand RNA virus transcription initiation signal, a nucleic acid encoding a tRNA, a nucleic acid encoding a gRNA, and a transcription termination polyadenylation signal.

[0250] In certain embodiments, the recombinant rabies virus genome comprises a gRNA expression cassette comprising, from 5′ to 3′, a negative-strand RNA virus transcription initiation signal, a nucleic acid encoding the first tRNA, a nucleic acid encoding the first gRNA, a nucleic acid encoding a second tRNA, and a transcription termination polyadenylation signal.

[0251] In certain embodiments, the recombinant rabies virus genome comprises a gRNA expression cassette comprising, from 5′ to 3′, a negative-strand RNA virus transcription initiation signal, a nucleic acid encoding the first tRNA, a nucleic acid encoding the first gRNA, a nucleic acid encoding a second tRNA, a nucleic acid encoding a second gRNA, and a transcription termination polyadenylation signal.

[0252] In certain embodiments, the recombinant rabies virus genome comprises a gRNA expression cassette comprising, from 5′ to 3′, a negative-strand RNA virus transcription initiation signal, a nucleic acid encoding the first tRNA, a nucleic acid encoding the first gRNA, a nucleic acid encoding a second tRNA, a nucleic acid encoding a second gRNA, and a transcription termination polyadenylation signal.

[0253] In certain embodiments, the recombinant rabies virus genome comprises a gRNA expression cassette comprising, from 5′ to 3′, a negative-strand RNA virus transcription initiation signal, a nucleic acid encoding the first tRNA, a nucleic acid encoding the first gRNA, a nucleic acid encoding a second tRNA, a nucleic acid encoding a second gRNA, a nucleic acid encoding a third tRNA, and a transcription termination polyadenylation signal.

[0254] In certain embodiments of the gRNA expression cassette, the nucleic acid encoding the first tRNA, second tRNA, and/or third tRNA are identical. In certain embodiments of the gRNA expression cassette, the nucleic acid encoding the first tRNA, second tRNA, and/or third tRNA are different. In certain embodiments of the gRNA expression cassette, the nucleotide sequence of the first tRNA and the nucleotide sequence of the second tRNA are at least 90%, 91%, 92%, 93%, 94%, 95%, 96%, 97%, 98%, 99%, or 100% identical. In certain embodiments of the gRNA expression cassette, the first tRNA and the second tRNA specify the same amino acid. In certain embodiments of the gRNA expression cassette, the first tRNA and the second tRNA specify different amino acids. In certain embodiments of the gRNA expression cassette, the nucleic acid encoding the first gRNA and/or second gRNA are identical. In certain embodiments of the gRNA expression cassette, the nucleic acid encoding the first gRNA and/or second gRNA are different. In certain embodiments of the gRNA expression cassette, the nucleotide sequence of the first gRNA and the nucleotide sequence of the second gRNA are at least 90%, 91%, 92%, 93%, 94%, 95%, 96%, 97%, 98%, 99%, or 100% identical. In certain embodiments of the gRNA expression cassette, the first gRNA and the second gRNA specifically hybridize to the same target nucleic acid sequence. In certain embodiments of the gRNA expression cassette, the first gRNA and the second gRNA specifically hybridize to different target nucleic acid sequence. In certain embodiments of the gRNA expression cassette, the transcription termination polyadenylation signal comprises an endogenous transcription termination polyadenylation signal. In certain embodiments of the gRNA expression cassette, the transcription termination polyadenylation signal comprises a heterologous transcription termination polyadenylation signal.

### D. THERAPEUTIC TRANSGENES

[0255] In certain embodiments, a recombinant rabies virus genome of the present disclosure encodes a nucleic acid comprising a therapeutic transgene. As used herein, the term “therapeutic” refers to treatment and/or prophylaxis. As used herein, the term “therapeutic transgene” refers to a transgene that encodes a transgene product that is capable of effecting treatment and/or prophylaxis to a subject in need. In certain embodiments, the therapeutic effect is accomplished by suppression, remission, or eradication of a disease state suffered by the subject. The therapeutic transgene may encode any therapeutic agent that is capable of effecting treatment and/or prophylaxis in a subject in need, resulting in suppression, remission, or eradication of a disease state in the subject. In certain embodiments, the therapeutic transgene encodes a precursor of a transgene product that is capable of effecting treatment and/or prophylaxis to a subject in need thereof once processed, e.g., processed in a cell.

[0256] In certain embodiments, the nucleic acid encoding the therapeutic transgene is greater than: about 300 bp, about 400 bp, about 500 bp, about 600 bp, about 700 bp, about 800 bp, about 900 bp, about 1,000 bp, about 1,100 bp, about 1,200 bp, about 1,300 bp, about 1,400 bp, about 1,500 bp, about 1,600 bp, about 1,700 bp, about 1,800 bp, about 1,900 bp, about 2,000 bp, about 2,100 bp, about 2,200 bp, about 2,300 bp, about 2,400 bp, about 2,500 bp, about 2,600 bp, about 2,700 bp, about 2,800 bp, about 2,900 bp, or about 3,000 bp.

[0257] In certain embodiments, the nucleic acid encoding the therapeutic transgene is greater than about 300 bp (e.g., the therapeutic transgene is about 350 bp, about 400 bp, about 450 bp, about 500 bp, about 550 bp, about 600 bp, or about 650 bp). In certain embodiments, the nucleic acid encoding the therapeutic transgene is greater than about 650 bp (e.g., the therapeutic transgene is about 700 bp, about 750 bp, about 800 bp, about 850 bp, about 900 bp, about 950 bp, or about 1,000 bp). In certain embodiments, the nucleic acid encoding the therapeutic transgene is greater than about 1,000 bp (e.g., the therapeutic transgene is about 1,500 bp, about 2,000 bp, about 2,500 bp, or about 3,000 bp). In certain embodiments, the nucleic acid encoding the therapeutic transgene is greater than about 3,000 bp (e.g., the therapeutic transgene is about 3,500 bp, about 4,000 bp, or about 4,500 bp).

[0258] In certain embodiments, the nucleic acid encoding the therapeutic transgene is greater than about 4,500 bp (e.g., the therapeutic transgene is about 5,000 bp, about 5,500 bp, about 6,000 bp, about 6,500 bp, about 7,000 bp, about 7,500 bp, about 8,000 bp, or about 8,500 bp).

[0259] In certain embodiments, the nucleic acid encoding the therapeutic transgene is greater than about 8,500 bp (e.g., the therapeutic transgene is about 9,000 bp, about 9,500 bp, or about 10,000 bp).

[0260] In certain embodiments, the nucleic acid encoding the therapeutic transgene is greater than about 10,000 bp (e.g., the therapeutic transgene is about 10,500 bp, about 11,000 bp, about 11,500 bp, about 12,000 bp, about 12,500 bp, about 13,000 bp, about 13,500 bp, about 14,000 bp, about 14,500 bp, or about 15,000 bp).

[0261] In certain embodiments, the nucleic acid encoding the therapeutic transgene is between about 4,000 bp and about 6,000 bp (e.g., the therapeutic transgene is about 4,000 bp, about 4,500 bp, about 5,000 bp, about 5,500 bp, or about 6,000 bp).

[0262] In certain embodiments, the therapeutic transgene encodes a therapeutic nucleic acid. The therapeutic transgene may encode any therapeutic nucleic acid known in the art, for example, without limitation, any antisense RNA (single-stranded RNA), any small interfering RNA (double-stranded RNA), any RNA aptamer, and/or any messenger RNA (mRNA). For example, the therapeutic transgene can encode, without limitation, a miRNA, a miRNA mimic, a siRNA, a shRNA, a gRNA, a long noncoding RNA, an enhancer RNA, a RNA aptazyme, a RNA aptamer, an antagomiR, and/or a synthetic RNA. In certain embodiments, a therapeutic nucleic acid may be a RNA binding site, e.g., a miRNA binding site. Various other types of therapeutic nucleic acids are known to those of ordinary skill in the art.

[0263] In certain embodiments, the therapeutic transgene encodes a therapeutic polypeptide. The therapeutic transgene may encode any therapeutic polypeptide known in the art, for example, without limitation, a therapeutic polypeptide that can replace a deficient or abnormal protein; a therapeutic polypeptide that can augment an existing pathway; a therapeutic polypeptide that can provide a novel function or activity (e.g., a novel function or activity beneficial to a subject suffering from the lack thereof); a therapeutic polypeptide that interferes with a molecule or an organism (e.g., an organism that is different to the organism that hosts the target cell); and/or a therapeutic polypeptide that delivers other compounds or proteins (e.g., a radionuclide, a cytotoxic drug, and/or an effector protein). For example, the therapeutic transgene can encode, without limitation, a nucleic acid modifying protein (e.g., an adenine or cytidine base editor) or system, an antibody or antibody-based drug, an anticoagulant, a blood factor, a bone morphogenetic protein, an engineered protein scaffold, an enzyme, an Fc fusion protein, a growth factor, a hormone, an interferon, an interleukin, and/or a thrombolytic. Various other types of therapeutic polypeptides are known to those of ordinary skill in the art.

[0264] In certain embodiments, the therapeutic transgene encodes a nucleic acid editing system or components thereof. In some embodiments the therapeutic transgene encodes a protein comprising a nucleic acid binding protein (e.g., a zinc finger, a TALE, or a nucleic acid programmable nucleic acid binding protein, such as Cas9). In some embodiments, the nucleic acid editing system component is a nucleic acid programmable nucleic acid binding protein (e.g., Cas9). In some embodiments, the nucleic acid editing system component is a guide RNA (gRNA).

[0265] In some embodiments, the therapeutic transgene encodes a CRISPR system. In some embodiments, the CRISPR system comprises a nucleobase editor comprising a polynucleotide programmable nucleotide binding domain and a nucleobase editing domain. In some embodiments, the nucleobase editing domain is an adenosine deaminase, cytidine deaminase, cytosine deaminase, or a functional variant thereof (e.g, a functional variant capable of deaminating a nucleobase in a nucleic acid molecule such as DNA or RNA). In some embodiments, the nucleobase editing domain is an adenosine deaminase. In some embodiments, the adenosine deaminase is ABE7.10. In some embodiments, the polynucleotide programmable nucleotide binding domain is a Cas9 polypeptide, a Cas12 polypeptide, or a functional variant thereof. In some embodiments, the CRISPR system further comprises a guide RNA (gRNA) or a nucleic acid encoding a gRNA.

[0266] In some embodiments the therapeutic transgene encodes a nucleobase modifying protein (e.g., a base editor protein). In some embodiments the therapeutic transgene encodes an adenosine base editor (e.g., ABE7.10). In some embodiments the therapeutic transgene encodes a cytidine base editor. In some embodiments the therapeutic transgene encodes a cytosine base editor capable of deaminating a cytosine in DNA or RNA.

[0267] In certain embodiments, the therapeutic transgene encodes a nucleic acid editing system, e.g., a base editor system further described herein.

[0268] It will be readily apparent to those of ordinary skill in the art that a recombinant rabies virus genome of the present disclosure described herein encodes a nucleic acid comprising a therapeutic transgene, wherein the therapeutic transgene encodes a therapeutic polypeptide and/or a therapeutic nucleic acid, e.g., in certain embodiments, the therapeutic transgene encodes a combination of the therapeutic polypeptide and the therapeutic nucleic acid. In certain embodiments, the therapeutic transgene encodes one or more therapeutic polypeptides. In certain embodiments, the therapeutic transgene encodes one or more therapeutic nucleic acids. In certain embodiments, the therapeutic transgene encodes a combination of one or more therapeutic polypeptides and one or more therapeutic nucleic acids. Delivery of a combination of a therapeutic polypeptide and therapeutic nucleic acid into a target cell may serve various purposes known to those of ordinary skill in the art. In certain embodiments, a therapeutic polypeptide may be delivered to a target cell, wherein the delivery is detargeted to certain other cell types. For example, a therapeutic transgene can encode a therapeutic polypeptide and/or therapeutic nucleic acid, and also comprise a miRNA binding site. The miRNA binding site may function for cell type detargeting. For example, miRNA122a, which is expressed exlusively in liver, can be employed for hepatocyte detargeting. See, e.g., Dhungel et al., Molecules (2018) 23(7): 1500.

[0269] In certain embodiments, the therapeutic transgene further encodes one or more reporter sequences. Reporter sequences when expressed in the target cell, produces a directly or an indirectly detectable signal. Examples of suitable reporter sequences include, without limitation, sequences encoding for fluorescent proteins (e.g., GFP, RFP, YFP), alkaline phosphatase, thymidine kinase, chloramphenicol acetyltransferase (CAT), luciferase, β-galactosidase (LacZ), and β-lactamase. Sequences encoding for cell surface membrane-bound proteins may also be suitable as reporter sequences, for example, membrane-bound proteins to which high affinity antibodies bind, e.g., influenza hemagglutinin protein (HA), CD2, CD4, CD8, and others known to those of ordinary skill in the art, including, e.g., membrane-bound proteins tagged with an antigen domain (e.g., an HA tag, a FLAG tag, a Myc tag, a polyhistidine tag).

[0270] In certain embodiments, the therapeutic transgene does not encode a reporter gene and/or a selectable marker. In certain embodiments, the therapeutic transgene does not encode a fluorescent reporter protein (e.g., GFP, YFP, RFP, tdTomato). In certain embodiments, the therapeutic transgene does not encode β-galactosidase (LacZ). In certain embodiments, the therapeutic transgene does not encode chloramphenicol acetyltransferase (CAT).

[0271] In certain embodiments, the therapeutic transgene does not encode a polymerase (e.g., DNA polymerase, DNA-directed RNA polymerase, RNA-directed DNA polumerase (RT), telomerase).

[0272] In certain embodiments, the therapeutic transgene does not encode a site-specific recombinase (e.g., Cre, FLP, Hin, or Tre recombinases).

[0273] In certain embodiments, the therapeutic transgene does not encode a viral antigen.

[0274] In certain embodiments, the therapeutic transgene does not encode a pro-apoptotic protein (e.g., cytochrome c).

[0275] In certain embodiments, the therapeutic transgene does not encode an an immunoglobulin (e.g., an immunoglobulin heavy and/or light chain.

[0276] In certain embodiments, the therapeutic transgene does not encode a neurotransmitter, a neuropeptide, a receptor, a neuronal growth factor, or a neurome gene.

[0277] In certain embodiments, the therapeutic transgene encodes for a therapeutic polypeptide and/or a therapeutic nucleic acid, wherein the therapeutic polypeptide and/or the therapeutic nucleic acid are secreted (e.g., secreted from a cell). For example, a recombinant rabies virus genome of the present disclosure described herein may be introduced into a target cell, wherein the recombinant rabies virus genome encodes a nucleic acid comprising a therapeutic transgene, and wherein the therapeutic transgene encodes a therapeutic polypeptide and/or a therapeutic nucleic acid that is secreted (e.g., a secretable therapeutic transgene and/or a secretable therapeutic nucleic acid). The therapeutic polypeptide and/or nucleic acid upon expression, may be secreted outside of the target cell. In certain embodiments, the therapeutic polypeptide and/or nucleic acid, upon expression, is secreted by virtue of endogenous elements that reside on the therapeutic polypeptide and/or nucleic acid (e.g., an endogenous signal peptide that directs extracellular secretion). In certain embodiments, the therapeutic polypeptide and/or nucleic acid, upon expression, is secreted by virtue of exogenous elements that reside on the therapeutic polypeptide and/or nucleic acid (e.g., an exogenous signal peptide that directs extracellular secretion). Delivery of secretable therapeutic polypeptides and/or nucleic acids are useful in the treatment of certain diseases. For example, lysosomal storage disorders (LSD) that result from the metabolic dysfunction of the lysosome comprise a unique cross-correction characteristic that allows specific extracellular LSD enzymes to be taken up and targeted to the lysosomes of enzyme-deficient or enzyme-abnormal cells. Cross-correction chracteristics of certain enzymes form the basis of approved therapies known as enzyme replacement therapies. See, e.g., Rastall and Amalfitano, Appl. Clin. Genet. (2015) 8: 157-169.

[0278] In certain embodiments, a recombinant rabies virus genome of the present disclosure comprises a transcriptional regulatory element operably linked to the nucleic acid encoding a transgene. The transcriptional regulatory element is capable of controlling the expression of the transgene (e.g., expression of the encoded therapeutic polypeptide and/or nucleic acid) that is operably linked thereto. In certain embodiments, the transcriptional regulatory element comprises a transcription initiation signal. The transcription initiation signal can be endogenous or exogenous to the rabies virus. In certain embodiments, the transcription initiation signal is a synthetic transcription initiation signal. In certain embodiments, the nucleic acid encoding a transgene is further operably linked to a transcription termination polyadenylation signal. The transcription termination polyadenylation signal can be endogenous or exogenous to the rabies virus. In certain embodiments, the transcription termination polyadenylation signal is a synthetic transcription termination polyadenylation signal. Examples of suitable transcription initiation signals and transcriptional termination polyadenylaton signals are known to those of ordinary skill in the art, and are described in, e.g., Albertini et al., Adv. Virus. Res. (2011) 79: 1-22; Ogino and Green, Viruses (2019) 11(6): 504; and Ogino and Green, Front. Microbiol. (2019) 10: 1490, the disclosures of which are herein incorporated by reference in their entireties.

[0279] A recombinant rabies virus genome of the present disclosure comprising a nucleic acid comprising a therapeutic transgene may further comprise any elements known to those of ordinary skill in the art that aid and/or enhance in the expression of the therapeutic transgene.

[0280] Recombinant rabies virus genomes of the present disclosure are incorporated into a recombinant rabies virus particle by methods described herein. In certain embodiments, a recombinant rabies virus particle of the present disclosure comprises a rabies virus glycoprotein and a recombinant rabies virus genome comprising a nucleic acid comprising a therapeutic transgene as described herein. In certain embodiments, the recombinant rabies virus particle comprises: a rabies virus glycoprotein; and a recombinant rabies virus genome comprising a nucleic acid comprising a therapeutic transgene, wherein the genome lacks an endogenous G gene encoding for a rabies virus glycoprotein. In certain embodiments, the recombinant rabies virus particle comprises: a rabies virus glycoprotein; and a recombinant rabies virus genome comprising a nucleic acid comprising a therapeutic transgene, wherein the genome lacks an endogenous G gene encoding for a rabies virus glycoprotein; and wherein the genome lacks an endogenous L gene encoding for a rabies virus polymerase.

### E. NUCLEOBASE EDITORS

[0281] In certain exemplary embodiments, therapeutic transgenes useful in the methods and compositions described herein are nucleobase editors that edit, modify or alter a target nucleotide sequence of a polynucleotide. Nucleobase editors described herein typically include a polynucleotide programmable nucleotide binding domain and a nucleobase editing domain (e.g., adenosine deaminase or cytidine deaminase). A polynucleotide programmable nucleotide binding domain, when in conjunction with a bound guide polynucleotide (e.g., gRNA), can specifically bind to a target polynucleotide sequence and thereby localize the base editor to the target nucleic acid sequence desired to be edited.

### Polynucleotide Programmable Nucleotide Binding Domain

[0282] Polynucleotide programmable nucleotide binding domains bind polynucleotides (e.g., RNA, DNA). A polynucleotide programmable nucleotide binding domain of a base editor can itself comprise one or more domains (e.g., one or more nuclease domains). In some embodiments, the nuclease domain of a polynucleotide programmable nucleotide binding domain can comprise an endonuclease or an exonuclease. An endonuclease can cleave a single strand of a double-stranded nucleic acid or both strands of a double-stranded nucleic acid molecule. In some embodiments, a nuclease domain of a polynucleotide programmable nucleotide binding domain can cut zero, one, or two strands of a target polynucleotide.

[0283] Non-limiting examples of a polynucleotide programmable nucleotide binding domain which can be incorporated into a base editor include a CRISPR protein-derived domain, a restriction nuclease, a meganuclease, TAL nuclease (TALEN), and a zinc finger nuclease (ZFN). In some embodiments, a base editor comprises a polynucleotide programmable nucleotide binding domain comprising a natural or modified protein or portion thereof which via a bound guide nucleic acid is capable of binding to a nucleic acid sequence during CRISPR (i.e., Clustered Regularly Interspaced Short Palindromic Repeats)-mediated modification of a nucleic acid. Such a protein is referred to herein as a “CRISPR protein.” Accordingly, disclosed herein is a base editor comprising a polynucleotide programmable nucleotide binding domain comprising all or a portion of a CRISPR protein (i.e. a base editor comprising as a domain all or a portion of a CRISPR protein, also referred to as a “CRISPR protein-derived domain” of the base editor). A CRISPR protein-derived domain incorporated into a base editor can be modified compared to a wild-type or natural version of the CRISPR protein. For example, as described below a CRISPR protein-derived domain can comprise one or more mutations, insertions, deletions, rearrangements and/or recombinations relative to a wild-type or natural version of the CRISPR protein.

[0284] Cas proteins that can be used herein include class 1 and class 2. Non-limiting examples of Cas proteins include Cas1, Cas1B, Cas2, Cas3, Cas4, Cas5, Cas5d, Cas5t, Cas5h, Cas5a, Cas6, Cas7, Cas8, Cas9 (also known as Csn1 or Csx12), Cas10, Csy1, Csy2, Csy3, Csy4, Cse1, Cse2, Cse3, Cse4, Cse5e, Csc1, Csc2, Csa5, Csn1, Csn2, Csm1, Csm2, Csm3, Csm4, Csm5, Csm6, Cmr1, Cmr3, Cmr4, Cmr5, Cmr6, Csb1, Csb2, Csb3, Csx17, Csx14, Csx10, Csx16, CsaX, Csx3, Csx1, Csx1S, Csf1, Csf2, CsO, Csf4, Csd1, Csd2, Cst1, Cst2, Csh1, Csh2, Csa1, Csa2, Csa3, Csa4, Csa5, Cas12a/Cpf1, Cas12b/C2c1 (e.g., SEQ ID NO: 258), Cas12c/C2c3, Cas12d/CasY, Cas12e/CasX, Cas12g, Cas12h, Cas12i, and Cas12j/Casϕ, CARF, DinG, homologues thereof, or modified versions thereof. A CRISPR enzyme can direct cleavage of one or both strands at a target sequence, such as within a target sequence and/or within a complement of a target sequence. For example, a CRISPR enzyme can direct cleavage of one or both strands within about 1, 2, 3, 4, 5, 6, 7, 8, 9, 10, 15, 20, 25, 50, 100, 200, 500, or more base pairs from the first or last nucleotide of a target sequence.

[0285] A vector that encodes a CRISPR enzyme that is mutated to with respect, to a corresponding wild-type enzyme such that the mutated CRISPR enzyme lacks the ability to cleave one or both strands of a target polynucleotide containing a target sequence can be used. A Cas protein (e.g., Cas9, Cas12) or a Cas domain (e.g., Cas9, Cas12) can refer to a polypeptide or domain with at least or at least about 50%, 60%, 70%, 80%, 90%, 91%, 92%, 93%, 94%, 95%, 96%, 97%, 98%, 99%, or 100% sequence identity and/or sequence homology to a wild-type exemplary Cas polypeptide or Cas domain. Cas (e.g., Cas9, Cas12) can refer to the wild-type or a modified form of the Cas protein that can comprise an amino acid change such as a deletion, insertion, substitution, variant, mutation, fusion, chimera, or any combination thereof.

In some embodiments, a CRISPR protein-derived domain of a base editor can include all or a portion of Cas9 from Corynebacterium ulcerans (NCBI Refs: NC_015683.1, NC_017317.1); Corynebacterium diphtheria (NCBI Refs: NC_016782.1, NC_016786.1); Spiroplasma syrphidicola (NCBI Ref: NC_021284.1); Prevotella intermedia (NCBI Ref: NC_017861.1); Spiroplasma taiwanense (NCBI Ref: NC_021846.1); Streptococcus iniae (NCBI Ref: NC_021314.1); Belliella baltica (NCBI Ref: NC_018010.1); Psychroflexus torquis (NCBI Ref: NC_018721.1); Streptococcus thermophilus (NCBI Ref: YP_820832.1); Listeria innocua (NCBI Ref: NP_472073.1); Campylobacter jejuni (NCBI Ref: YP_002344900.1); Neisseria meningitidis (NCBI Ref: YP_002342100.1), Streptococcus pyogenes, or Staphylococcus aureus.

[0286] Cas9 nuclease sequences and structures are well known to those of skill in the art (See, e.g., “Complete genome sequence of an MI strain of Streptococcus pyogenes.” Ferretti et al., Proc. Natl. Acad. Sci. U.S.A. 98:4658-4663(2001); “CRISPR RNA maturation by trans-encoded small RNA and host factor RNase III.” Deltcheva E., et al., Nature 471:602-607(2011); and “A programmable dual-RNA-guided DNA endonuclease in adaptive bacterial immunity.” Jinek M., et al., Science 337:816-821(2012), the entire contents of each of which are incorporated herein by reference). Cas9 orthologs have been described in various species, including, but not limited to, S. pyogenes and S. thermophilus. Additional suitable Cas9 nucleases and sequences will be apparent to those of skill in the art based on this disclosure, and such Cas9 nucleases and sequences include Cas9 sequences from the organisms and loci disclosed in Chylinski, Rhun, and Charpentier, “The tracrRNA and Cas9 families of type II CRISPR-Cas immunity systems” (2013) RNA Biology 10:5, 726-737; the entire contents of which are incorporated herein by reference.

[0287] High Fidelity Cas9 Domains

[0288] Some aspects of the disclosure provide high fidelity Cas9 domains. High fidelity Cas9 domains are known in the art and described, for example, in Kleinstiver, B. P., et al. “High-fidelity CRISPR-Cas9 nucleases with no detectable genome-wide off-target effects.” Nature 529, 490-495 (2016); and Slaymaker, I. M., et al. “Rationally engineered Cas9 nucleases with improved specificity.” Science 351, 84-88 (2015); the entire contents of each of which are incorporated herein by reference. An Exemplary high fidelity Cas9 domain is provided in the Sequence Listing as SEQ ID NO: 1423. In some embodiments, high fidelity Cas9 domains are engineered Cas9 domains comprising one or more mutations that decrease electrostatic interactions between the Cas9 domain and the sugar-phosphate backbone of a DNA, relative to a corresponding wild-type Cas9 domain. High fidelity Cas9 domains that have decreased electrostatic interactions with the sugar-phosphate backbone of DNA have less off-target effects. In some embodiments, the Cas9 domain (e.g., a wild type Cas9 domain (SEQ ID NOs: 223 and 233)) comprises one or more mutations that decrease the association between the Cas9 domain and the sugar-phosphate backbone of a DNA. In some embodiments, a Cas9 domain comprises one or more mutations that decreases the association between the Cas9 domain and the sugar-phosphate backbone of DNA by at least 1%, at least 2%, at least 3%, at least 4%, at least 5%, at least 10%, at least 15%, at least 20%, at least 25%, at least 30%, at least 35%, at least 40%, at least 45%, at least 50%, at least 55%, at least 60%, at least 65%, or at least 70%.

[0289] In some embodiments, any of the Cas9 fusion proteins provided herein comprise one or more of a D10A, N497X, a R661X, a Q695X, and/or a Q926X mutation, or a corresponding mutation in any of the amino acid sequences provided herein, wherein X is any amino acid. In some embodiments, the high fidelity Cas9 enzyme is SpCas9(K855A), eSpCas9(1.1), SpCas9-HF1, or hyper accurate Cas9 variant (HypaCas9). In some embodiments, the modified Cas9 eSpCas9(1.1) contains alanine substitutions that weaken the interactions between the HNH/RuvC groove and the non-target DNA strand, preventing strand separation and cutting at off-target sites. Similarly, SpCas9-HF1 lowers off-target editing through alanine substitutions that disrupt Cas9's interactions with the DNA phosphate backbone. HypaCas9 contains mutations (SpCas9 N692A/M694A/Q695A/H698A) in the REC3 domain that increase Cas9 proofreading and target discrimination. All three high fidelity enzymes generate less off-target editing than wildtype Cas9.

[0290] Cas9 Domains with Reduced Exclusivity

[0291] Typically, Cas9 proteins, such as Cas9 from S. pyogenes (spCas9), require a “protospacer adjacent motif (PAM)” or PAM-like motif, which is a 2-6 base pair DNA sequence immediately following the DNA sequence targeted by the Cas9 nuclease in the CRISPR bacterial adaptive immune system. The presence of an NGG PAM sequence is required to bind a particular nucleic acid region, where the “N” in “NGG” is adenosine (A), thymidine (T), or cytosine (C), and the G is guanosine. This may limit the ability to edit desired bases within a genome. In some embodiments, the base editing fusion proteins provided herein may need to be placed at a precise location, for example a region comprising a target base that is upstream of the PAM. See e.g., Komor, A. C., et al., “Programmable editing of a target base in genomic DNA without double-stranded DNA cleavage” Nature 533, 420-424 (2016), the entire contents of which are hereby incorporated by reference. Exemplary polypeptide sequences for spCas9 proteins capable of binding a PAM sequence are provided in the Sequenc Listing as SEQ ID NOs: 223, 234, and 1304-1307. Accordingly, in some embodiments, any of the fusion proteins provided herein may contain a Cas9 domain that is capable of binding a nucleotide sequence that does not contain a canonical (e.g., NGG) PAM sequence. Cas9 domains that bind to non-canonical PAM sequences have been described in the art and would be apparent to the skilled artisan. For example, Cas9 domains that bind non-canonical PAM sequences have been described in Kleinstiver, B. P., et al., “Engineered CRISPR-Cas9 nucleases with altered PAM specificities” Nature 523, 481-485 (2015); and Kleinstiver, B. P., et al., “Broadening the targeting range of Staphylococcus aureus CRISPR-Cas9 by modifying PAM recognition” Nature Biotechnology 33, 1293-1298 (2015); the entire contents of each are hereby incorporated by reference.

[0292] Nickases

[0293] In some embodiments, the polynucleotide programmable nucleotide binding domain can comprise a nickase domain. Herein the term “nickase” refers to a polynucleotide programmable nucleotide binding domain comprising a nuclease domain that is capable of cleaving only one strand of the two strands in a duplexed nucleic acid molecule (e.g., DNA). In some embodiments, a nickase can be derived from a fully catalytically active (e.g., natural) form of a polynucleotide programmable nucleotide binding domain by introducing one or more mutations into the active polynucleotide programmable nucleotide binding domain. For example, where a polynucleotide programmable nucleotide binding domain comprises a nickase domain derived from Cas9, the Cas9-derived nickase domain can include a D10A mutation and a histidine at position 840. In such embodiments, the residue H840 retains catalytic activity and can thereby cleave a single strand of the nucleic acid duplex. In another example, a Cas9-derived nickase domain can comprise an H840A mutation, while the amino acid residue at position 10 remains a D. In some embodiments, a nickase can be derived from a fully catalytically active (e.g., natural) form of a polynucleotide programmable nucleotide binding domain by removing all or a portion of a nuclease domain that is not required for the nickase activity. For example, where a polynucleotide programmable nucleotide binding domain comprises a nickase domain derived from Cas9, the Cas9-derived nickase domain can comprise a deletion of all or a portion of the RuvC domain or the HNH domain.

[0294] In some embodiments, wild-type Cas9 corresponds to, or comprises the following amino acid sequence:

(SEQ ID NO: 223)
MDKKYSIGLDIGTNSVGWAVITDEYKVPSKKFKVLGNTDRHSIKKNLIGA
LLFDSGETAEATRLKRTARRRYTRRKNRICYLQEIFSNEMAKVDDSFFHR
LEESFLVEEDKKHERHPIFGNIVDEVAYHEKYPTIYHLRKKLVDSTDKAD
LRLIYLALAHMlKFRGHFLIEGDLNPDNSDVDKLFIQLVQTYNQLFEENP
INASGVDAKAILSARLSKSRRLENLIAQLPGEKKNGLFGNLIALSLGLTP
NFKSNFDLAEDAKLQLSKDTYDDDLDNLLAQIGDQYADLFLAAKNLSDAI
LLSDILRVNTEITKAPLSASMIKRYDEHHQDLTLLKALVRQQLPEKYKEI
FFDQSKNGYAGYIDGGASQEEFYKFIKPILEKMDGTEELLVKLNREDLLR
KQRTFDNGSIPHQIHLGELHAILRRQEDFYPFLKDNREKIEKILTFRIPY
YVGPLARGNSRFAWMTRKSEETITPWNFEEVVDKGASAQSFIERMTNFDK
NLPNEKVLPKHSLLYEYFTVYNELTKVKYVTEGMRKPAFLSGEQKKAIVD
LLFKTNRKVTVKQLKEDYFKKIECFDSVEISGVEDRFNASLGTYHDLLKI
IKDKDFLDNEENEDILEDIVLTLTLFEDREMIEERLKTYAHLFDDKVMKQ
LKRRRYTGWGRLSRKLINGIRDKQSGKTILDFLKSDGFANRNFMQLIHDD
SLTFKEDIQKAQVSGQGDSLHEHIANLAGSPAIKKGILQTVKVVDELVKV
MGRHKPENIVIEMARENQTTQKGQKNSRERMKRIEEGIKELGSQILKEHP
VENTQLQNEKLYLYYLQNGRDMYVDQELDINRLSDYDVDHIVPQSFLKDD
SIDNKVLTRSDKNRGKSDNVPSEEWKKMKNYWRQLLNAKLITQRKFDNLT
KAERGGLSELDKAGFIKRQLVETRQITKHVAQILDSRMNTKYDENDKLIR
EVKVITLKSKLVSDFRKDFQFYKVREINNYHHAHDAYLNAVVGTALIKKY
PKLESEFVYGDYKVYDVRKMIAKSEQEIGKATAKYFFYSNIMNFFKTEIT
LANGELRKRPLIETNGETGEIVWDKGRDFATVRKVLSMPQVNIVKKTEVQ
TGGFSKESILPKRNSDKLIARKKDWDPKKYGGFDSPTVAYSVLVVAKVEK
GKSKKLKSVKELLGITIMERSSFEKNPIDFLEAKGYKEVKKDLIIKLPKY
SLFELENGRKRMLASAGELQKGNELALPSKYVNFLYLASHYEKLKGSPED
NEQKQLFVEQHKHYLDEIIEQISEFSKRVILADANLDKVLSAYNKHRDKP
IREQAENIIHLFTLTNLGAPAAFKYFDTTIDRKRYTSTKEVLDATLIHQS
ITGLYETRIDLSQLGGD
(single underline: HNH domain;
double underline: RuvC domain).

[0295] In some embodiments, the strand of a nucleic acid duplex target polynucleotide sequence that is cleaved by a base editor comprising a nickase domain (e.g., Cas9-derived nickase domain, Cas12-derived nickase domain) is the strand that is not edited by the base editor (i.e., the strand that is cleaved by the base editor is opposite to a strand comprising a base to be edited). In other embodiments, a base editor comprising a nickase domain (e.g., Cas9-derived nickase domain, Cas12-derived nickase domain) can cleave the strand of a DNA molecule which is being targeted for editing. In such embodiments, the non-targeted strand is not cleaved.

In some embodiments, a Cas9 nuclease has an inactive (e.g., an inactivated) DNA cleavage domain, that is, the Cas9 is a nickase, referred to as an “nCas9” protein (for “nickase” Cas9). The Cas9 nickase may be a Cas9 protein that is capable of cleaving only one strand of a duplexed nucleic acid molecule (e.g., a duplexed DNA molecule). In some embodiments the Cas9 nickase cleaves the target strand of a duplexed nucleic acid molecule, meaning that the Cas9 nickase cleaves the strand that is base paired to (complementary to) a gRNA (e.g., an sgRNA) that is bound to the Cas9. In some embodiments, a Cas9 nickase comprises a D10A mutation and has a histidine at position 840. In some embodiments the Cas9 nickase cleaves the non-target, non-base-edited strand of a duplexed nucleic acid molecule, meaning that the Cas9 nickase cleaves the strand that is not base paired to a gRNA (e.g., an sgRNA) that is bound to the Cas9. In some embodiments, a Cas9 nickase comprises an H840A mutation and has an aspartic acid residue at position 10, or a corresponding mutation. In some embodiments the Cas9 nickase comprises an amino acid sequence that is at least 60%, at least 65%, at least 70%, at least 75%, at least 80%, at least 85%, at least 90%, at least 95%, at least 96%, at least 97%, at least 98%, at least 99%, or at least 99.5% identical to any one of the Cas9 nickases provided herein. Additional suitable Cas9 nickases will be apparent to those of skill in the art based on this disclosure and knowledge in the field, and are within the scope of this disclosure.

[0296] The amino acid sequence of an exemplary catalytically Cas9 nickase (nCas9) is as follows:

(SEQ ID NO: 234)
MDKKYSIGLAIGTNSVGWAVITDEYKVPSKKFKVLGNTDRHSIKKNLIGA
LLFDSGETAEATRLKRTARRRYTRRKNRICYLQEIFSNEMAKVDDSFFHR
LEESFLVEEDKKHERHPIFGNIVDEVAYHEKYPTIYHLRKKLVDSTDKAD
LRLIYLALAHMIKFRGHFLIEGDLNPDNSDVDKLFIQLVQTYNQLFEENP
INASGVDAKAILSARLSKSRRLENLIAQLPGEKKNGLFGNLIALSLGLTP
NFKSNFDLAEDAKLQLSKDTYDDDLDNLLAQIGDQYADLFLAAKNLSDAI
LLSDILRVNTEITKAPLSASMIKRYDEHHQDLTLLKALVRQQLPEKYKEI
FFDQSKNGYAGYIDGGASQEEFYKFIKPILEKMDGTEELLVKLNREDLLR
KQRTFDNGSIPHQIHLGELHAILRRQEDFYPFLKDNREKIEKILTFRIPY
YVGPLARGNSRFAWMTRKSEETITPWNFEEVVDKGASAQSFIERMTNFDK
NLPNEKVLPKHSLLYEYFTVYNELTKVKYVTEGMRKPAFLSGEQKKAIVD
LLFKTNRKVTVKQLKEDYFKKIECFDSVEISGVEDRFNASLGTYHDLLKI
IKDKDFLDNEENEDILEDIVLTLTLFEDREMIEERLKTYAHLFDDKVMKQ
LKRRRYTGWGRLSRKLINGIRDKQSGKTILDFLKSDGFANRNFMQLIHDD
SLTFKEDIQKAQVSGQGDSLHEHIANLAGSPAIKKGILQTVKVVDELVKV
MGRHKPENIVIEMARENQTTQKGQKNSRERMKRIEEGIKELGSQILKEHP
VENTQLQNEKLYLYYLQNGRDMYVDQELDINRLSDYDVDHIVPQSFLKDD
SIDNKVLTRSDKNRGKSDNVPSEEVVKKMKNYWRQLLNAKLITQRKFDNL
TKAERGGLSELDKAGFiKRQLVETRQITKHVAQILDSRMNTKYDENDKLI
REVKVITLKSKLVSDFRKDFQFYKVREINNYHHAHDAYLNAVVGTALIKK
YPKLESEFVYGDYKVYDVRKMIAKSEQEIGKATAKYFFYSNIMNFFKTEI
TLANGEIRKRPLIETNGETGEIVWDKGRDFATVRKVLSMPQVNIVKKTEV
QTGGFSKESILPKRNSDKLIARKKDWDPKKYGGFDSPTVAYSVLVVAKVE
KGKSKKLKSVKELLGITIMERSSFEKNPIDFLEAKGYKEVKKDLIIKLPK
YSLFELENGRKRMLASAGELQKGNELALPSKYVNFLYLASHYEKLKGSPE
DNEQKQLFVEQHKHYLDEIIEQISEFSKRVILADANLDKVLSAYNKHRDK
PIREQAENIIHLFTLTNLGAPAAFKYFDTTIDRKRYTSTKEVLDATLIHQ
SITGLYETRIDLSQLGGD

[0297] The Cas9 nuclease has two functional endonuclease domains: RuvC and HNH. Cas9 undergoes a conformational change upon target binding that positions the nuclease domains to cleave opposite strands of the target DNA. The end result of Cas9-mediated DNA cleavage is a double-strand break (DSB) within the target DNA (˜3-4 nucleotides upstream of the PAM sequence). The resulting DSB is then repaired by one of two general repair pathways: (1) the efficient but error-prone non-homologous end joining (NHEJ) pathway; or (2) the less efficient but high-fidelity homology directed repair (HDR) pathway.

[0298] The “efficiency” of non-homologous end joining (NHEJ) and/or homology directed repair (HDR) can be calculated by any convenient method. For example, in some embodiments, efficiency can be expressed in terms of percentage of successful HDR. For example, a surveyor nuclease assay can be used to generate cleavage products and the ratio of products to substrate can be used to calculate the percentage. For example, a surveyor nuclease enzyme can be used that directly cleaves DNA containing a newly integrated restriction sequence as the result of successful HDR. More cleaved substrate indicates a greater percent HDR (a greater efficiency of HDR). As an illustrative example, a fraction (percentage) of HDR can be calculated using the following equation [(cleavage products)/(substrate plus cleavage products)] (e.g., (b+c)/(a+b+c), where “a” is the band intensity of DNA substrate and “b” and “c” are the cleavage products).

[0299] In some embodiments, efficiency can be expressed in terms of percentage of successful NHEJ. For example, a T7 endonuclease I assay can be used to generate cleavage products and the ratio of products to substrate can be used to calculate the percentage NHEJ. T7 endonuclease I cleaves mismatched heteroduplex DNA which arises from hybridization of wild-type and mutant DNA strands (NHEJ generates small random insertions or deletions (indels) at the site of the original break). More cleavage indicates a greater percent NHEJ (a greater efficiency of NHEJ). As an illustrative example, a fraction (percentage) of NHEJ can be calculated using the following equation: (1−(1−(b+c)/(a+b+c))^{1/2})×100, where “a” is the band intensity of DNA substrate and “b” and “c” are the cleavage products (Ran et. al., Cell. 2013 Sep. 12; 154(6):1380-9; and Ran et al., Nat Protoc. 2013 November; 8(11): 2281-2308).

[0300] The NHEJ repair pathway is the most active repair mechanism, and it frequently causes small nucleotide insertions or deletions (indels) at the DSB site. The randomness of NHEJ-mediated DSB repair has important practical implications, because a population of cells expressing Cas9 and a gRNA or a guide polynucleotide can result in a diverse array of mutations. In most embodiments, NHEJ gives rise to small indels in the target DNA that result in amino acid deletions, insertions, or frameshift mutations leading to premature stop codons within the open reading frame (ORF) of the targeted gene. The ideal end result is a loss-of-function mutation within the targeted gene.

[0301] While NHEJ-mediated DSB repair often disrupts the open reading frame of the gene, homology directed repair (HDR) can be used to generate specific nucleotide changes ranging from a single nucleotide change to large insertions like the addition of a fluorophore or tag.

[0302] In order to utilize HDR for gene editing, a DNA repair template containing the desired sequence can be delivered into the cell type of interest with the gRNA(s) and Cas9 or Cas9 nickase. The repair template can contain the desired edit as well as additional homologous sequence immediately upstream and downstream of the target (termed left & right homology arms). The length of each homology arm can be dependent on the size of the change being introduced, with larger insertions requiring longer homology arms. The repair template can be a single-stranded oligonucleotide, double-stranded oligonucleotide, or a double-stranded DNA plasmid. The efficiency of HDR is generally low (<10% of modified alleles) even in cells that express Cas9, gRNA and an exogenous repair template. The efficiency of HDR can be enhanced by synchronizing the cells, since HDR takes place during the S and G2 phases of the cell cycle. Chemically or genetically inhibiting genes involved in NHEJ can also increase HDR frequency.

[0303] In some embodiments, Cas9 is a modified Cas9. A given gRNA targeting sequence can have additional sites throughout the genome where partial homology exists. These sites are called off-targets and need to be considered when designing a gRNA. In addition to optimizing gRNA design, CRISPR specificity can also be increased through modifications to Cas9. Cas9 generates double-strand breaks (DSBs) through the combined activity of two nuclease domains, RuvC and HNH. Cas9 nickase, a D10A mutant of SpCas9, retains one nuclease domain and generates a DNA nick rather than a DSB. The nickase system can also be combined with HDR-mediated gene editing for specific gene edits.

### Catalyically Dead Nucleases

[0304] Also provided herein are base editors comprising a polynucleotide programmable nucleotide binding domain which is catalytically dead (i.e., incapable of cleaving a target polynucleotide sequence). Herein the terms “catalytically dead” and “nuclease dead” are used interchangeably to refer to a polynucleotide programmable nucleotide binding domain which has one or more mutations and/or deletions resulting in its inability to cleave a strand of a nucleic acid. In some embodiments, a catalytically dead polynucleotide programmable nucleotide binding domain base editor can lack nuclease activity as a result of specific point mutations in one or more nuclease domains. For example, in the case of a base editor comprising a Cas9 domain, the Cas9 can comprise both a D10A mutation and an H840A mutation. Such mutations inactivate both nuclease domains, thereby resulting in the loss of nuclease activity. In other embodiments, a catalytically dead polynucleotide programmable nucleotide binding domain can comprise one or more deletions of all or a portion of a catalytic domain (e.g., RuvC1 and/or HNH domains). In further embodiments, a catalytically dead polynucleotide programmable nucleotide binding domain comprises a point mutation (e.g., D10A or H840A) as well as a deletion of all or a portion of a nuclease domain. dCas9 domains are known in the art and described, for example, in Qi et al., “Repurposing CRISPR as an RNA-guided platform for sequence-specific control of gene expression.” Cell. 2013; 152(5):1173-83, the entire contents of which are incorporated herein by reference.

[0305] Additional suitable nuclease-inactive dCas9 domains will be apparent to those of skill in the art based on this disclosure and knowledge in the field, and are within the scope of this disclosure. Such additional exemplary suitable nuclease-inactive Cas9 domains include, but are not limited to, D10A/H840A, D10A/D839A/H840A, and D10A/D839A/H840A/N863A mutant domains (See, e.g., Prashant et al., CAS9 transcriptional activators for target specificity screening and paired nickases for cooperative genome engineering. Nature Biotechnology. 2013; 31(9): 833-838, the entire contents of which are incorporated herein by reference).

[0306] In some embodiments, dCas9 corresponds to, or comprises in part or in whole, a Cas9 amino acid sequence having one or more mutations that inactivate the Cas9 nuclease activity. In some embodiments, the nuclease-inactive dCas9 domain comprises a D10X mutation and a H840X mutation of the amino acid sequence set forth herein, or a corresponding mutation in any of the amino acid sequences provided herein, wherein X is any amino acid change. In some embodiments, the nuclease-inactive dCas9 domain comprises a D10A mutation and a H840A mutation of the amino acid sequence set forth herein, or a corresponding mutation in any of the amino acid sequences provided herein. In some embodiments, a nuclease-inactive Cas9 domain comprises the amino acid sequence set forth in Cloning vector pPlatTET-gRNA2 (Accession No. BAV54124).

[0307] In some embodiments, a variant Cas9 protein can cleave the complementary strand of a guide target sequence but has reduced ability to cleave the non-complementary strand of a double stranded guide target sequence. For example, the variant Cas9 protein can have a mutation (amino acid substitution) that reduces the function of the RuvC domain. As a non-limiting example, in some embodiments, a variant Cas9 protein has a D10A (aspartate to alanine at amino acid position 10) and can therefore cleave the complementary strand of a double stranded guide target sequence but has reduced ability to cleave the non-complementary strand of a double stranded guide target sequence (thus resulting in a single strand break (SSB) instead of a double strand break (DSB) when the variant Cas9 protein cleaves a double stranded target nucleic acid) (see, for example, Jinek et al., Science. 2012 Aug. 17; 337(6096):816-21).

[0308] In some embodiments, a variant Cas9 protein can cleave the non-complementary strand of a double stranded guide target sequence but has reduced ability to cleave the complementary strand of the guide target sequence. For example, the variant Cas9 protein can have a mutation (amino acid substitution) that reduces the function of the HNH domain (RuvC/HNH/RuvC domain motifs). As a non-limiting example, in some embodiments, the variant Cas9 protein has an H840A (histidine to alanine at amino acid position 840) mutation and can therefore cleave the non-complementary strand of the guide target sequence but has reduced ability to cleave the complementary strand of the guide target sequence (thus resulting in a SSB instead of a DSB when the variant Cas9 protein cleaves a double stranded guide target sequence). Such a Cas9 protein has a reduced ability to cleave a guide target sequence (e.g., a single stranded guide target sequence) but retains the ability to bind a guide target sequence (e.g., a single stranded guide target sequence).

[0309] As another non-limiting example, in some embodiments, the variant Cas9 protein harbors W476A and W1126A mutations such that the polypeptide has a reduced ability to cleave a target DNA. Such a Cas9 protein has a reduced ability to cleave a target DNA (e.g., a single stranded target DNA) but retains the ability to bind a target DNA (e.g., a single stranded target DNA).

[0310] As another non-limiting example, in some embodiments, the variant Cas9 protein harbors P475A, W476A, N477A, D1125A, W1126A, and D1127A mutations such that the polypeptide has a reduced ability to cleave a target DNA. Such a Cas9 protein has a reduced ability to cleave a target DNA (e.g., a single stranded target DNA) but retains the ability to bind a target DNA (e.g., a single stranded target DNA).

[0311] As another non-limiting example, in some embodiments, the variant Cas9 protein harbors H840A, W476A, and W1126A, mutations such that the polypeptide has a reduced ability to cleave a target DNA. Such a Cas9 protein has a reduced ability to cleave a target DNA (e.g., a single stranded target DNA) but retains the ability to bind a target DNA (e.g., a single stranded target DNA). As another non-limiting example, in some embodiments, the variant Cas9 protein harbors H840A, D10A, W476A, and W1126A, mutations such that the polypeptide has a reduced ability to cleave a target DNA. Such a Cas9 protein has a reduced ability to cleave a target DNA (e.g., a single stranded target DNA) but retains the ability to bind a target DNA (e.g., a single stranded target DNA). In some embodiments, the variant Cas9 has restored catalytic His residue at position 840 in the Cas9 HNH domain (A840H).

[0312] As another non-limiting example, in some embodiments, the variant Cas9 protein harbors, H840A, P475A, W476A, N477A, D1125A, W1126A, and D1127A mutations such that the polypeptide has a reduced ability to cleave a target DNA. Such a Cas9 protein has a reduced ability to cleave a target DNA (e.g., a single stranded target DNA) but retains the ability to bind a target DNA (e.g., a single stranded target DNA). As another non-limiting example, in some embodiments, the variant Cas9 protein harbors D10A, H840A, P475A, W476A, N477A, D1125A, W1126A, and D1127A mutations such that the polypeptide has a reduced ability to cleave a target DNA. Such a Cas9 protein has a reduced ability to cleave a target DNA (e.g., a single stranded target DNA) but retains the ability to bind a target DNA (e.g., a single stranded target DNA). In some embodiments, when a variant Cas9 protein harbors W476A and W1126A mutations or when the variant Cas9 protein harbors P475A, W476A, N477A, D1125A, W1126A, and D1127A mutations, the variant Cas9 protein does not bind efficiently to a PAM sequence. Thus, in some such embodiments, when such a variant Cas9 protein is used in a method of binding, the method does not require a PAM sequence. In other words, in some embodiments, when such a variant Cas9 protein is used in a method of binding, the method can include a guide RNA, but the method can be performed in the absence of a PAM sequence (and the specificity of binding is therefore provided by the targeting segment of the guide RNA). Other residues can be mutated to achieve the above effects (i.e., inactivate one or the other nuclease portions). As non-limiting examples, residues D10, G12, G17, E762, H840, N854, N863, H982, H983, A984, D986, and/or A987 can be altered (i.e., substituted). Also, mutations other than alanine substitutions are suitable.

[0313] In some embodiments, a variant Cas9 protein that has reduced catalytic activity (e.g., when a Cas9 protein has a D10, G12, G17, E762, H840, N854, N863, H982, H983, A984, D986, and/or a A987 mutation, e.g., D10A, G12A, G17A, E762A, H840A, N854A, N863A, H982A, H983A, A984A, and/or D986A), the variant Cas9 protein can still bind to target DNA in a site-specific manner (because it is still guided to a target DNA sequence by a guide RNA) as long as it retains the ability to interact with the guide RNA.

[0314] In some embodiments, the variant Cas protein can be spCas9, spCas9-VRQR, spCas9-VRER, xCas9 (sp), saCas9, saCas9-KKH, spCas9-MQKSER, spCas9-LRKIQK, or spCas9-LRVSQL.

[0315] In some embodiments, the Cas9 domain is a Cas9 domain from Staphylococcus aureus (SaCas9). In some embodiments, the SaCas9 domain is a nuclease active SaCas9, a nuclease inactive SaCas9 (SaCas9d), or a SaCas9 nickase (SaCas9n). In some embodiments, the SaCas9 comprises a N579A mutation, or a corresponding mutation in any of the amino acid sequences provided in the Sequence Listing submitted herewith.

[0316] In some embodiments, the SaCas9 domain, the SaCas9d domain, or the SaCas9n domain can bind to a nucleic acid sequence having a non-canonical PAM. In some embodiments, the SaCas9 domain, the SaCas9d domain, or the SaCas9n domain can bind to a nucleic acid sequence having a NNGRRT or a NNGRRV PAM sequence. In some embodiments, the SaCas9 domain comprises one or more of a E781X, a N967X, and a R1014X mutation, or a corresponding mutation in any of the amino acid sequences provided herein, wherein X is any amino acid. In some embodiments, the SaCas9 domain comprises one or more of a E781K, a N967K, and a R1014H mutation, or one or more corresponding mutation in any of the amino acid sequences provided herein. In some embodiments, the SaCas9 domain comprises a E781K, a N967K, or a R1014H mutation, or corresponding mutations in any of the amino acid sequences provided herein.

[0317] In some embodiments, one of the Cas9 domains present in the fusion protein may be replaced with a guide nucleotide sequence-programmable DNA-binding protein domain that has no requirements for a PAM sequence. In some embodiments, the Cas9 is an SaCas9. Residue A579 of SaCas9 can be mutated from N579 to yield a SaCas9 nickase. Residues K781, K967, and H1014 can be mutated from E781, N967, and R1014 to yield a SaKKH Cas9.

[0318] In some embodiments, a modified SpCas9 including amino acid substitutions D1135M, S1136Q, G1218K, E1219F, A1322R, D1332A, R1335E, and T1337R (SpCas9-MQKFRAER) and having specificity for the altered PAM 5′-NGC-3′ was used.

[0319] Alternatives to S. pyogenes Cas9 can include RNA-guided endonucleases from the Cpf1 family that display cleavage activity in mammalian cells. CRISPR from Prevotella and Francisella 1 (CRISPR/Cpf1) is a DNA-editing technology analogous to the CRISPR/Cas9 system. Cpf1 is an RNA-guided endonuclease of a class II CRISPR/Cas system. This acquired immune mechanism is found in Prevotella and Francisella bacteria. Cpf1 genes are associated with the CRISPR locus, coding for an endonuclease that use a guide RNA to find and cleave viral DNA. Cpf1 is a smaller and simpler endonuclease than Cas9, overcoming some of the CRISPR/Cas9 system limitations. Unlike Cas9 nucleases, the result of Cpf1-mediated DNA cleavage is a double-strand break with a short 3′ overhang. Cpf1's staggered cleavage pattern can open up the possibility of directional gene transfer, analogous to traditional restriction enzyme cloning, which can increase the efficiency of gene editing. Like the Cas9 variants and orthologues described above, Cpf1 can also expand the number of sites that can be targeted by CRISPR to AT-rich regions or AT-rich genomes that lack the NGG PAM sites favored by SpCas9. The Cpf1 locus contains a mixed alpha/beta domain, a RuvC-I followed by a helical region, a RuvC-II and a zinc finger-like domain. The Cpf1 protein has a RuvC-like endonuclease domain that is similar to the RuvC domain of Cas9.

[0320] Furthermore, Cpf1, unlike Cas9, does not have a HNH endonuclease domain, and the N-terminal of Cpf1 does not have the alpha-helical recognition lobe of Cas9. Cpf1 CRISPR-Cas domain architecture shows that Cpf1 is functionally unique, being classified as Class 2, type V CRISPR system. The Cpf1 loci encode Cas1, Cas2 and Cas4 proteins that are more similar to types I and III than type II systems. Functional Cpf1 does not require the trans-activating CRISPR RNA (tracrRNA), therefore, only CRISPR (crRNA) is required. This benefits genome editing because Cpf1 is not only smaller than Cas9, but also it has a smaller sgRNA molecule (approximately half as many nucleotides as Cas9). The Cpf1-crRNA complex cleaves target DNA or RNA by identification of a protospacer adjacent motif 5′-YTN-3′ or 5′-TTN-3′ in contrast to the G-rich PAM targeted by Cas9. After identification of PAM, Cpf1 introduces a sticky-end-like DNA double-stranded break having an overhang of 4 or 5 nucleotides.

[0321] In some embodiments, the Cas9 is a Cas9 variant having specificity for an altered PAM sequence. In some embodiments, the Additional Cas9 variants and PAM sequences are described in Miller, S. M., et al. Continuous evolution of SpCas9 variants compatible with non-G PAMs, Nat. Biotechnol. (2020), the entirety of which is incorporated herein by reference. in some embodiments, a Cas9 variate have no specific PAM requirements. In some embodiments, a Cas9 variant, e.g. a SpCas9 variant has specificity for a NRNH PAM, wherein R is A or G and H is A, C, or T. In some embodiments, the SpCas9 variant has specificity for a PAM sequence AAA, TAA, CAA, GAA, TAT, GAT, or CAC. In some embodiments, the SpCas9 variant comprises an amino acid substitution at position 1114, 1134, 1135, 1137, 1139, 1151, 1180, 1188, 1211, 1218, 1219, 1221, 1249, 1256, 1264, 1290, 1318, 1317, 1320, 1321, 1323, 1332, 1333, 1335, 1337, or 1339 or a corresponding position thereof. In some embodiments, the SpCas9 variant comprises an amino acid substitution at position 1114, 1135, 1218, 1219, 1221, 1249, 1320, 1321, 1323, 1332, 1333, 1335, or 1337 or a corresponding position thereof. In some embodiments, the SpCas9 variant comprises an amino acid substitution at position 1114, 1134, 1135, 1137, 1139, 1151, 1180, 1188, 1211, 1219, 1221, 1256, 1264, 1290, 1318, 1317, 1320, 1323, 1333 or a corresponding position thereof. In some embodiments, the SpCas9 variant comprises an amino acid substitution at position 1114, 1131, 1135, 1150, 1156, 1180, 1191, 1218, 1219, 1221, 1227, 1249, 1253, 1286, 1293, 1320, 1321, 1332, 1335, 1339 or a corresponding position thereof. In some embodiments, the SpCas9 variant comprises an amino acid substitution at position 1114, 1127, 1135, 1180, 1207, 1219, 1234, 1286, 1301, 1332, 1335, 1337, 1338, 1349 or a corresponding position thereof. Exemplary amino acid substitutions and PAM specificity of SpCas9 variants are shown in Tables 2A-2D.

TABLE 2A
SpCas9 Variants

| | SpCas9 amino acid position | | | | | | | | | | | | |
|---|---|---|---|---|---|---|---|---|---|---|---|---|---|
| | 1114 | 1135 | 1218 | 1219 | 1221 | 1249 | 1320 | 1321 | 1323 | 1332 | 1333 | 1335 | 1337 |
| SpCas9 | R | D | G | E | Q | P | A | P | A | D | R | R | T |
| AAA | | N | | V | H | | | | | | G | | |
| AAA | | N | | V | H | | | | | | G | | |
| AAA | | | | V | | | | | | | G | | |
| TAA | G | N | | V | | | | | | | I | | |
| TAA | | N | | V | | | | | | | I | | A |
| TAA | G | N | | V | | | | | | | I | | A |
| CAA | | | | V | | | | | | | K | | |
| CAA | | N | | V | | | | | | | K | | |
| CAA | | N | | V | | | | | | | K | | |
| GAA | | | | V | H | | V | | | | K | | |
| GAA | | N | | V | | | V | | | | K | | |
| GAA | | | | V | H | | V | | | | K | | |
| TAT | | | S | V | H | S | | S | | | | L | |
| TAT | | | S | V | H | S | | S | | | | L | |
| TAT | | | S | V | H | S | | S | | | | L | |
| GAT | | | | V | | | | | | | I | | |
| GAT | | | | V | | | | | D | | | Q | |
| GAT | | | | V | | | | | D | | | Q | |
| CAC | | | | V | | | | | | N | | Q | N |
| CAC | | N | | V | | | | | | | | Q | N |
| CAC | | | | V | | | | | | N | | Q | N |

TABLE 2B

| | SpCas9 amino acid position | | | | | | | | | | | | | | | | | | |
|---|---|---|---|---|---|---|---|---|---|---|---|---|---|---|---|---|---|---|---|
| | 1114 | 1134 | 1135 | 1137 | 1139 | 1151 | 1180 | 1188 | 1211 | 1219 | 1221 | 1256 | 1264 | 1290 | 1318 | 1317 | 1320 | 1323 | 1333 |
| SpCas9 | R | F | D | P | V | K | D | K | K | E | Q | Q | H | V | L | N | A | A | R |
| GAA | | | | | | | | | | V | H | | | | | | V | | K |
| GAA | | | N | S | | | | | | V | | | | | | | V | D | K |
| GAA | | | N | | | | | | | V | H | | Y | | | | V | | K |
| CAA | | | N | | | | | | | V | H | | Y | | | | V | | K |
| CAA | G | | N | S | | | | | | V | H | | Y | | | | V | | K |
| CAA | | | N | | | | | R | | V | H | | | | | | V | | K |
| CAA | | | N | | | | G | | R | V | H | | Y | | | | V | | K |
| CAA | | | N | | | | | | | V | H | | Y | | | | V | | K |
| AAA | | | N | | | | G | | | V | H | R | Y | | | | V | D | K |
| CAA | G | | N | | | | G | | | V | H | | Y | | | | V | D | K |
| CAA | | L | N | | | | G | | | V | H | | Y | | | T | V | D | K |
| TAA | G | | N | | | | G | | | V | H | | Y | G | S | | V | D | K |
| TAA | G | | N | | | E | G | | | V | H | | Y | | S | | V | | K |
| TAA | G | | N | | | | G | | | V | H | | Y | | S | | V | D | K |
| TAA | G | | N | | | | G | | R | V | H | | | | | | V | | K |
| TAA | | | N | | | | G | | R | V | H | | Y | | | | V | | K |
| TAA | G | | N | | A | | G | | | V | H | | | | | | V | | K |
| TAA | G | | N | | | | | | | V | H | | | | | | V | | K |

TABLE 2C

| | SpCas9 amino acid position | | | | | | | | | | |
|---|---|---|---|---|---|---|---|---|---|---|---|
| | 1114 | 1131 | 1135 | 1150 | 1156 | 1180 | 1191 | 1218 | 1219 | 1221 | 1227 |
| SpCas9 | R | Y | D | E | K | D | K | G | E | Q | A |
| SacB.TAT | | | N | | | | N | | V | H | |
| SacB.TAT | | | N | | | | | S | V | H | |
| AAT | | | N | | | S | | | V | H | V |
| TAT | G | | N | | | G | | S | V | H | |
| TAT | G | | N | | | G | | S | V | H | |
| TAT | G | C | N | | | G | | S | V | H | |
| TAT | G | C | N | | | G | | S | V | H | |
| TAT | G | C | N | | | G | | S | V | H | |
| TAT | G | C | N | | E | G | | S | V | H | |
| TAT | G | C | N | V | | G | | S | V | H | |
| TAT | | C | N | | | G | | S | V | H | |
| TAT | G | C | N | | | G | | S | V | H | |

| | SpCas9 amino acid position | | | | | | | | |
|---|---|---|---|---|---|---|---|---|---|
| | 1249 | 1253 | 1286 | 1293 | 1320 | 1321 | 1332 | 1335 | 1339 |
| SpCas9 | P | E | N | A | A | P | D | R | T |
| SacB.TAT | | | | | V | S | | L | |
| SacB.TAT | S | | | | | S | G | L | |
| AAT | S | | K | T | | S | G | L | I |
| TAT | S | K | | | | S | G | L | |
| TAT | S | | | | | S | G | L | |
| TAT | S | | | | | S | G | L | |
| TAT | S | | | | | S | G | L | |
| TAT | S | | | | | S | G | L | |
| TAT | S | | | | | S | G | L | |
| TAT | S | | | | | S | G | L | |
| TAT | S | | | | | S | G | L | |
| TAT | S | | | | | S | G | L | |

TABLE 2D

| | SpCas9 amino acid position | | | | | | | | | | | | | |
|---|---|---|---|---|---|---|---|---|---|---|---|---|---|---|
| | 1114 | 1127 | 1135 | 1180 | 1207 | 1219 | 1234 | 1286 | 1301 | 1332 | 1335 | 1337 | 1338 | 1349 |
| SpCas9 | R | D | D | D | E | E | N | N | P | D | R | T | S | H |
| SacB.CAC | | | N | | | V | | | | N | Q | N | | |
| AAC | G | | N | | | V | | | | N | Q | N | | |
| AAC | G | | N | | | V | | | | N | Q | N | | |
| TAC | G | | N | | | V | | | | N | Q | N | | |
| TAC | G | | N | | | V | | H | | N | Q | N | | |
| TAC | G | | N | | G | V | D | H | | N | Q | N | | |
| TAC | G | | N | | | V | | | | N | Q | N | | |
| TAC | G | G | N | E | | V | | H | | N | Q | N | | |
| TAC | G | | N | | | V | | H | | N | Q | N | | |
| TAC | G | | N | | | V | | | | N | Q | N | T | R |

[0322] In some embodiments, the nucleic acid programmable DNA binding protein (napDNAbp) is a single effector of a microbial CRISPR-Cas system. Single effectors of microbial CRISPR-Cas systems include, without limitation, Cas9, Cpf1, Cas12b/C2c1, and Cas12c/C2c3. Typically, microbial CRISPR-Cas systems are divided into Class 1 and Class 2 systems. Class 1 systems have multisubunit effector complexes, while Class 2 systems have a single protein effector. For example, Cas9 and Cpf1 are Class 2 effectors. In addition to Cas9 and Cpf1, three distinct Class 2 CRISPR-Cas systems (Cas12b/C2c1, and Cas12c/C2c3) have been described by Shmakov et al., “Discovery and Functional Characterization of Diverse Class 2 CRISPR Cas Systems”, Mol. Cell, 2015 Nov. 5; 60(3): 385-397, the entire contents of which is hereby incorporated by reference. Effectors of two of the systems, Cas12b/C2c1, and Cas12c/C2c3, contain RuvC-like endonuclease domains related to Cpf1. A third system contains an effector with two predicated HEPN RNase domains. Production of mature CRISPR RNA is tracrRNA-independent, unlike production of CRISPR RNA by Cas12b/C2c1. Cas12b/C2c1 depends on both CRISPR RNA and tracrRNA for DNA cleavage.

[0323] In some embodiments, the napDNAbp is a circular permutant (e.g., SEQ ID NO: 257).

[0324] The crystal structure of Alicyclobaccillus acidoterrastris Cas12b/C2c1 (AacC2c1) has been reported in complex with a chimeric single-molecule guide RNA (sgRNA). See e.g., Liu et “C2c1-sgRNA Complex Structure Reveals RNA-Guided DNA Cleavage Mechanism”, Mol. Cell, 2017 Jan. 19; 65(2):310-322, the entire contents of which are hereby incorporated by reference. The crystal structure has also been reported in Alicyclobacillus acidoterrestris C2c1 bound to target DNAs as ternary complexes. See e.g., Yang et al., “PAM-dependent Target DNA Recognition and Cleavage by C2C1 CRISPR-Cas endonuclease”, Cell, 2016 Dec. 15; 167(7):1814-1828, the entire contents of which are hereby incorporated by reference. Catalytically competent conformations of AacC2c1, both with target and non-target DNA strands, have been captured independently positioned within a single RuvC catalytic pocket, with Cas12b/C2c1-mediated cleavage resulting in a staggered seven-nucleotide break of target DNA. Structural comparisons between Cas12b/C2c1 ternary complexes and previously identified Cas9 and Cpf1 counterparts demonstrate the diversity of mechanisms used by CRISPR-Cas9 systems.

[0325] In some embodiments, the nucleic acid programmable DNA binding protein (napDNAbp) of any of the fusion proteins provided herein may be a Cas12b/C2c1, or a Cas12c/C2c3 protein. In some embodiments, the napDNAbp is a Cas12b/C2c1 protein. In some embodiments, the napDNAbp is a Cas12c/C2c3 protein. In some embodiments, the napDNAbp comprises an amino acid sequence that is at least 85%, at least 90%, at least 91%, at least 92%, at least 93%, at least 94%, at least 95%, at least 96%, at least 97%, at least 98%, at least 99%, or at ease 99.5% identical to a naturally-occurring Cas12b/C2c1 or Cas12c/C2c3 protein. In some embodiments, the napDNAbp is a naturally-occurring Cas12b/C2c1 or Cas12c/C2c3 protein. In some embodiments, the napDNAbp comprises an amino acid sequence that is at least 85%, at least 90%, at least 91%, at least 92%, at least 93%, at least 94%, at least 95%, at least 96%, at least 97%, at least 98%, at least 99%, or at ease 99.5% identical to any one of the napDNAbp sequences provided herein. It should be appreciated that Cas12b/C2c1 or Cas12c/C2c3 from other bacterial species may also be used in accordance with the present disclosure.

[0326] In some embodiments, a napDNAbp refers to Cas12c. In some embodiments, the Cas12c protein is a Cas12c1 (SEQ ID NO: 266) or a variant of Cas12c1. In some embodiments, the Cas12 protein is a Cas12c2 (SEQ ID NO: 267) or a variant of Cas12c2. In some embodiments, the Cas12 protein is a Cas12c protein from Oleiphilus sp. H10009 OspCas12c; SEQ ID NO: 268) or a variant of OspCas12c. These Cas12c molecules have been described in Yan et al., “Functionally Diverse Type V CRISPR-Cas Systems,” Science, 2019 Jan. 4; 363: 88-91; the entire contents of which is hereby incorporated by reference. In some embodiments, the napDNAbp comprises an amino acid sequence that is at least 85%, at least 90%, at least 91%, at least 92%, at least 93%, at least 94%, at least 95%, at least 96%, at least 97%, at least 98%, at least 99%, or at least 99.5% identical to a naturally-occurring Cas12c1, Cas12c2, or OspCas12c protein. In some embodiments, the napDNAbp is a naturally-occurring Cas12c1, Cas12c2, or OspCas12c protein. In some embodiments, the napDNAbp comprises an amino acid sequence that is at least 85%, at least 90%, at least 91%, at least 92%, at least 93%, at least 94%, at least 95%, at least 96%, at least 97%, at least 98%, at least 99%, or at ease 99.5% identical to any Cas12c1, Cas12c2, or OspCas12c protein described herein. It should be appreciated that Cas12c1, Cas12c2, or OspCas12c from other bacterial species may also be used in accordance with the present disclosure.

[0327] In some embodiments, a napDNAbp refers to Cas12g, Cas12h, or Cas12i, which have been described in, for example, Yan et al., “Functionally Diverse Type V CRISPR-Cas Systems,” Science, 2019 Jan. 4; 363: 88-91; the entire contents of each is hereby incorporated by reference. Exemplary Cas12g, Cas12h, and Cas12i polypeptide sequences are provided in the Sequence Listing as SEQ ID NOs: 269-272. By aggregating more than 10 terabytes of sequence data, new classifications of Type V Cas proteins were identified that showed weak similarity to previously characterized Class V protein, including Cas12g, Cas12h, and Cas12i. In some embodiments, the Cas12 protein is a Cas12g or a variant of Cas12g. In some embodiments, the Cas12 protein is a Cas12h or a variant of Cas12h. In some embodiments, the Cas12 protein is a Cas12i or a variant of Cas12i. It should be appreciated that other RNA-guided DNA binding proteins may be used as a napDNAbp, and are within the scope of this disclosure. In some embodiments, the napDNAbp comprises an amino acid sequence that is at least 85%, at least 90%, at least 91%, at least 92%, at least 93%, at least 94%, at least 95%, at least 96%, at least 97%, at least 98%, at least 99%, or at least 99.5% identical to a naturally-occurring Cas12g, Cas12h, or Cas12i protein. In some embodiments, the napDNAbp is a naturally-occurring Cas12g, Cas12h, or Cas12i protein. In some embodiments, the napDNAbp comprises an amino acid sequence that is at least 85%, at least 90%, at least 91%, at least 92%, at least 93%, at least 94%, at least 95%, at least 96%, at least 97%, at least 98%, at least 99%, or at ease 99.5% identical to any Cas12g, Cas12h, or Cas12i protein described herein. It should be appreciated that Cas12g, Cas12h, or Cas12i from other bacterial species may also be used in accordance with the present disclosure. In some embodiments, the Cas12i is a Cas12i1 or a Cas12i2.

[0328] In some embodiments, the nucleic acid programmable DNA binding protein (napDNAbp) of any of the fusion proteins provided herein may be a Cas12j/Casϕ protein. Cas12j/Casϕ is described in Pausch et al., “CRISPR-Casϕ from huge phages is a hypercompact genome editor,” Science, 17 Jul. 2020, Vol. 369, Issue 6501, pp. 333-337, which is incorporated herein by reference in its entirety. In some embodiments, the napDNAbp comprises an amino acid sequence that is at least 85%, at least 90%, at least 91%, at least 92%, at least 93%, at least 94%, at least 95%, at least 96%, at least 97%, at least 98%, at least 99%, or at ease 99.5% identical to a naturally-occurring Cas12j/Casϕ protein. In some embodiments, the napDNAbp is a naturally-occurring Cas12j/Casϕ protein. In some embodiments, the napDNAbp is a nuclease inactive (“dead”) Cas12j/Casϕ protein. It should be appreciated that Cas12j/Casϕ from other species may also be used in accordance with the present disclosure.

Fusion Proteins with Internal Insertion

[0329] Provided herein are fusion proteins comprising a heterologous polypeptide fused to a nucleic acid programmable nucleic acid binding protein, for example, a napDNAbp. A heterologous polypeptide can be a polypeptide that is not found in the native or wild-type napDNAbp polypeptide sequence. The heterologous polypeptide can be fused to the napDNAbp at a C-terminal end of the napDNAbp, an N-terminal end of the napDNAbp, or inserted at an internal location of the napDNAbpin some embodiments, the heterologous polypeptide is a deaminase (e.g., cytidine of adenosine deaminase) or a functional fragment thereof. For example, a fusion protein can comprise a deaminase flanked by an N-terminal fragment and a C-terminal fragment of a Cas9 or Cas12 (e.g., Cas12b/C2c1), polypeptide. In some embodiments, the cytidine deaminase is an APOBEC deaminase (e.g., APOBEC1). In some embodiments, the adenosine deaminase is a TadA (e.g., TadA*7.10 or TadA*8). In some embodiments, the TadA is a TadA*8 or a TadA*9. TadA sequences (e.g., TadA7.10 or TadA*8) as described herein are suitable deaminases for the above-described fusion proteins.

[0330] In some embodiments, the fusion protein comprises the structure:

NH2-[N-terminal fragment of a napDNAbp]-[deaminase]-[C-terminal fragment of a napDNAbp]-COOH;
NH2-[N-terminal fragment of a Cas9]-[adenosine deaminase]-[C-terminal fragment of a Cas9]-COOH;
NH2-[N-terminal fragment of a Cas12]-[adenosine deaminase]-[C-terminal fragment of a Cas12]-COOH;
NH2-[N-terminal fragment of a Cas9]-[cytidine deaminase]-[C-terminal fragment of a Cas9]-COOH;
NH2-[N-terminal fragment of a Cas12]-[cytidine deaminase]-[C-terminal fragment of a Cas12]-COOH;
wherein each instance of “]-[” is an optional linker.

[0331] The deaminase can be a circular permutant deaminase. For example, the deaminase can be a circular permutant adenosine deaminase. In some embodiments, the deaminase is a circular permutant TadA, circularly permutated at amino acid residue 116, 136, or 65 as numbered in the TadA reference sequence.

[0332] The fusion protein can comprise more than one deaminase. The fusion protein can comprise, for example, 1, 2, 3, 4, 5 or more deaminases. In some embodiments, the fusion protein comprises one or two deaminase. The two or more deaminases in a fusion protein can be an adenosine deaminase, a cytidine deaminase, or a combination thereof. The two or more deaminases can be homodimers or heterodimers. The two or more deaminases can be inserted in tandem in the napDNAbp. In some embodiments, the two or more deaminases may not be in tandem in the napDNAbp.

[0333] In some embodiments, the napDNAbp in the fusion protein is a Cas9 polypeptide or a fragment thereof. The Cas9 polypeptide can be a variant Cas9 polypeptide. In some embodiments, the Cas9 polypeptide is a Cas9 nickase (nCas9) polypeptide or a fragment thereof. In some embodiments, the Cas9 polypeptide is a nuclease dead Cas9 (dCas9) polypeptide or a fragment thereof. The Cas9 polypeptide in a fusion protein can be a full-length Cas9 polypeptide. In some cases, the Cas9 polypeptide in a fusion protein may not be a full length Cas9 polypeptide. The Cas9 polypeptide can be truncated, for example, at a N-terminal or C-terminal end relative to a naturally-occurring Cas9 protein. The Cas9 polypeptide can be a circularly permuted Cas9 protein. The Cas9 polypeptide can be a fragment, a portion, or a domain of a Cas9 polypeptide, that is still capable of binding the target polynucleotide and a guide nucleic acid sequence.

[0334] In some embodiments, the Cas9 polypeptide is a Streptococcus pyogenes Cas9 (SpCas9), Staphylococcus aureus Cas9 (SaCas9), Streptococcus thermophilus 1 Cas9 (St1Cas9), or fragments or variants of any of the Cas9 polypeptides described herein.

[0335] In some embodiments, the fusion protein comprises an adenosine deaminase domain and a cytidine deaminase domain inserted within a Cas9. In some embodiments, an adenosine deaminase is fused within a Cas9 and a cytidine deaminase is fused to the C-terminus. In some embodiments, an adenosine deaminase is fused within Cas9 and a cytidine deaminase fused to the N-terminus. In some embodiments, a cytidine deaminase is fused within Cas9 and an adenosine deaminase is fused to the C-terminus. In some embodiments, a cytidine deaminase is fused within Cas9 and an adenosine deaminase fused to the N-terminus.

[0336] Exemplary structures of a fusion protein with an adenosine deaminase and a cytidine deaminase and a Cas9 are provided as follows:

NH2-[Cas9(adenosine deaminase)]-[cytidine deaminase]-COOH;
NH2-[cytidine deaminase]-[Cas9(adenosine deaminase)]-COOH;
NH2-[Cas9(cytidine deaminase)]-[adenosine deaminase]-COOH; or
NH2-[adenosine deaminase]-[Cas9(cytidine deaminase)]-COOH.

[0337] In some embodiments, the “-” used in the general architecture above indicates the presence of an optional linker.

[0338] In various embodiments, the catalytic domain has DNA modifying activity (e.g., deaminase activity), such as adenosine deaminase activity. In some embodiments, the adenosine deaminase is a TadA (e.g., TadA*7.10). In some embodiments, the TadA is a TadA*8. In some embodiments, a TadA*8 is fused within Cas9 and a cytidine deaminase is fused to the C-terminus. In some embodiments, a TadA*8 is fused within Cas9 and a cytidine deaminase fused to the N-terminus. In some embodiments, a cytidine deaminase is fused within Cas9 and a TadA*8 is fused to the C-terminus. In some embodiments, a cytidine deaminase is fused within Cas9 and a TadA*8 fused to the N-terminus. Exemplary structures of a fusion protein with a TadA*8 and a cytidine deaminase and a Cas9 are provided as follows:

NH2-[Cas9(TadA*8)]-[cytidine deaminase]-COOH;
NH2-[cytidine deaminase]-[Cas9(TadA*8)]-COOH;
NH2-[Cas9(cytidine deaminase)]-[TadA*8]-COOH; or
NH2-[TadA*8]-[Cas9(cytidine deaminase)]-COOH.

[0339] In some embodiments, the “-” used in the general architecture above indicates the presence of an optional linker.

[0340] The heterologous polypeptide (e.g., deaminase) can be inserted in the napDNAbp (e.g., Cas9 or Cas12 (e.g., Cas12b/C2c1)) at a suitable location, for example, such that the napDNAbp retains its ability to bind the target polynucleotide and a guide nucleic acid. A deaminase (e.g., adenosine deaminase, cytidine deaminase, or adenosine deaminase and cytidine deaminase) can be inserted into a napDNAbp without compromising function of the deaminase (e.g., base editing activity) or the napDNAbp (e.g., ability to bind to target nucleic acid and guide nucleic acid). A deaminase (e.g., adenosine deaminase, cytidine deaminase, or adenosine deaminase and cytidine deaminase) can be inserted in the napDNAbp at, for example, a disordered region or a region comprising a high temperature factor or B-factor as shown by crystallographic studies. Regions of a protein that are less ordered, disordered, or unstructured, for example solvent exposed regions and loops, can be used for insertion without compromising structure or function. A deaminase (e.g., adenosine deaminase, cytidine deaminase, or adenosine deaminase and cytidine deaminase) can be inserted in the napDNAbp in a flexible loop region or a solvent-exposed region. In some embodiments, the deaminase (e.g., adenosine deaminase, cytidine deaminase, or adenosine deaminase and cytidine deaminase) is inserted in a flexible loop of the Cas9 or the Cas12b/C2c1 polypeptide.

[0341] In some embodiments, the insertion location of a deaminase (e.g., adenosine deaminase, cytidine deaminase, or adenosine deaminase and cytidine deaminase) is determined by B-factor analysis of the crystal structure of Cas9 polypeptide. In some embodiments, the deaminase (e.g., adenosine deaminase, cytidine deaminase, or adenosine deaminase and cytidine deaminase) is inserted in regions of the Cas9 polypeptide comprising higher than average B-factors (e.g., higher B factors compared to the total protein or the protein domain comprising the disordered region). B-factor or temperature factor can indicate the fluctuation of atoms from their average position (for example, as a result of temperature-dependent atomic vibrations or static disorder in a crystal lattice). A high B-factor (e.g., higher than average B-factor) for backbone atoms can be indicative of a region with relatively high local mobility. Such a region can be used for inserting a deaminase without compromising structure or function. A deaminase (e.g., adenosine deaminase, cytidine deaminase, or adenosine deaminase and cytidine deaminase) can be inserted at a location with a residue having a Ca atom with a B-factor that is 50%, 60%, 70%, 80%, 90%, 100%, 110%, 120%, 130%, 140%, 150%, 160%, 170%, 180%, 190%, 200%, or greater than 200% more than the average B-factor for the total protein. A deaminase (e.g., adenosine deaminase, cytidine deaminase, or adenosine deaminase and cytidine deaminase) can be inserted at a location with a residue having a Ca atom with a B-factor that is 50%, 60%, 70%, 80%, 90%, 100%, 110%, 120%, 130%, 140%, 150%, 160%, 170%, 180%, 190%, 200% or greater than 200% more than the average B-factor for a Cas9 protein domain comprising the residue. Cas9 polypeptide positions comprising a higher than average B-factor can include, for example, residues 768, 792, 1052, 1015, 1022, 1026, 1029, 1067, 1040, 1054, 1068, 1246, 1247, and 1248 as numbered in the above Cas9 reference sequence. Cas9 polypeptide regions comprising a higher than average B-factor can include, for example, residues 792-872, 792-906, and 2-791 as numbered in the above Cas9 reference sequence.

[0342] A heterologous polypeptide (e.g., deaminase) can be inserted in the napDNAbp at an amino acid residue selected from the group consisting of: 768, 791, 792, 1015, 1016, 1022, 1023, 1026, 1029, 1040, 1052, 1054, 1067, 1068, 1069, 1246, 1247, and 1248 as numbered in the above Cas9 reference sequence, or a corresponding amino acid residue in another Cas9 polypeptide. In some embodiments, the heterologous polypeptide is inserted between amino acid positions 768-769, 791-792, 792-793, 1015-1016, 1022-1023, 1026-1027, 1029-1030, 1040-1041, 1052-1053, 1054-1055, 1067-1068, 1068-1069, 1247-1248, or 1248-1249 as numbered in the above Cas9 reference sequence or corresponding amino acid positions thereof. In some embodiments, the heterologous polypeptide is inserted between amino acid positions 769-770, 792-793, 793-794, 1016-1017, 1023-1024, 1027-1028, 1030-1031, 1041-1042, 1053-1054, 1055-1056, 1068-1069, 1069-1070, 1248-1249, or 1249-1250 as numbered in the above Cas9 reference sequence or corresponding amino acid positions thereof. In some embodiments, the heterologous polypeptide replaces an amino acid residue selected from the group consisting of: 768, 791, 792, 1015, 1016, 1022, 1023, 1026, 1029, 1040, 1052, 1054, 1067, 1068, 1069, 1246, 1247, and 1248 as numbered in the above Cas9 reference sequence, or a corresponding amino acid residue in another Cas9 polypeptide. It should be understood that the reference to the above Cas9 reference sequence with respect to insertion positions is for illustrative purposes. The insertions as discussed herein are not limited to the Cas9 polypeptide sequence of the above Cas9 reference sequence, but include insertion at corresponding locations in variant Cas9 polypeptides, for example a Cas9 nickase (nCas9), nuclease dead Cas9 (dCas9), a Cas9 variant lacking a nuclease domain, a truncated Cas9, or a Cas9 domain lacking partial or complete HNH domain.

[0343] A heterologous polypeptide (e.g., deaminase) can be inserted in the napDNAbp at an amino acid residue selected from the group consisting of: 768, 792, 1022, 1026, 1040, 1068, and 1247 as numbered in the above Cas9 reference sequence, or a corresponding amino acid residue in another Cas9 polypeptide. In some embodiments, the heterologous polypeptide is inserted between amino acid positions 768-769, 792-793, 1022-1023, 1026-1027, 1029-1030, 1040-1041, 1068-1069, or 1247-1248 as numbered in the above Cas9 reference sequence or corresponding amino acid positions thereof. In some embodiments, the heterologous polypeptide is inserted between amino acid positions 769-770, 793-794, 1023-1024, 1027-1028, 1030-1031, 1041-1042, 1069-1070, or 1248-1249 as numbered in the above Cas9 reference sequence or corresponding amino acid positions thereof. In some embodiments, the heterologous polypeptide replaces an amino acid residue selected from the group consisting of: 768, 792, 1022, 1026, 1040, 1068, and 1247 as numbered in the above Cas9 reference sequence, or a corresponding amino acid residue in another Cas9 polypeptide.

[0344] A heterologous polypeptide (e.g., deaminase) can be inserted in the napDNAbp at an amino acid residue as described herein, or a corresponding amino acid residue in another Cas9 polypeptide. In an embodiment, a heterologous polypeptide (e.g., deaminase) can be inserted in the napDNAbp at an amino acid residue selected from the group consisting of: 1002, 1003, 1025, 1052-1056, 1242-1247, 1061-1077, 943-947, 686-691, 569-578, 530-539, and 1060-1077 as numbered in the above Cas9 reference sequence, or a corresponding amino acid residue in another Cas9 polypeptide. The deaminase (e.g., adenosine deaminase, cytidine deaminase, or adenosine deaminase and cytidine deaminase) can be inserted at the N-terminus or the C-terminus of the residue or replace the residue. In some embodiments, the deaminase (e.g., adenosine deaminase, cytidine deaminase, or adenosine deaminase and cytidine deaminase) is inserted at the C-terminus of the residue.

[0345] In some embodiments, an adenosine deaminase (e.g., TadA) is inserted at an amino acid residue selected from the group consisting of: 1015, 1022, 1029, 1040, 1068, 1247, 1054, 1026, 768, 1067, 1248, 1052, and 1246 as numbered in the above Cas9 reference sequence, or a corresponding amino acid residue in another Cas9 polypeptide. In some embodiments, an adenosine deaminase (e.g., TadA) is inserted in place of residues 792-872, 792-906, or 2-791 as numbered in the above Cas9 reference sequence, or a corresponding amino acid residue in another Cas9 polypeptide. In some embodiments, the adenosine deaminase is inserted at the N-terminus of an amino acid selected from the group consisting of: 1015, 1022, 1029, 1040, 1068, 1247, 1054, 1026, 768, 1067, 1248, 1052, and 1246 as numbered in the above Cas9 reference sequence, or a corresponding amino acid residue in another Cas9 polypeptide. In some embodiments, the adenosine deaminase is inserted at the C-terminus of an amino acid selected from the group consisting of: 1015, 1022, 1029, 1040, 1068, 1247, 1054, 1026, 768, 1067, 1248, 1052, and 1246 as numbered in the above Cas9 reference sequence, or a corresponding amino acid residue in another Cas9 polypeptide. In some embodiments, the adenosine deaminase is inserted to replace an amino acid selected from the group consisting of: 1015, 1022, 1029, 1040, 1068, 1247, 1054, 1026, 768, 1067, 1248, 1052, and 1246 as numbered in the above Cas9 reference sequence, or a corresponding amino acid residue in another Cas9 polypeptide.

[0346] In some embodiments, a cytidine deaminase (e.g., APOBEC1) is inserted at an amino acid residue selected from the group consisting of: 1016, 1023, 1029, 1040, 1069, and 1247 as numbered in the above Cas9 reference sequence, or a corresponding amino acid residue in another Cas9 polypeptide. In some embodiments, the cytidine deaminase is inserted at the N-terminus of an amino acid selected from the group consisting of: 1016, 1023, 1029, 1040, 1069, and 1247 as numbered in the above Cas9 reference sequence, or a corresponding amino acid residue in another Cas9 polypeptide. In some embodiments, the cytidine deaminase is inserted at the C-terminus of an amino acid selected from the group consisting of: 1016, 1023, 1029, 1040, 1069, and 1247 as numbered in the above Cas9 reference sequence, or a corresponding amino acid residue in another Cas9 polypeptide. In some embodiments, the cytidine deaminase is inserted to replace an amino acid selected from the group consisting of: 1016, 1023, 1029, 1040, 1069, and 1247 as numbered in the above Cas9 reference sequence, or a corresponding amino acid residue in another Cas9 polypeptide.

[0347] In some embodiments, the deaminase (e.g., adenosine deaminase, cytidine deaminase, or adenosine deaminase and cytidine deaminase) is inserted at amino acid residue 768 as numbered in the above Cas9 reference sequence, or a corresponding amino acid residue in another Cas9 polypeptide. In some embodiments, the deaminase (e.g., adenosine deaminase, cytidine deaminase, or adenosine deaminase and cytidine deaminase) is inserted at the N-terminus of amino acid residue 768 as numbered in the above Cas9 reference sequence, or a corresponding amino acid residue in another Cas9 polypeptide. In some embodiments, the deaminase (e.g., adenosine deaminase, cytidine deaminase, or adenosine deaminase and cytidine deaminase) is inserted at the C-terminus of amino acid residue 768 as numbered in the above Cas9 reference sequence, or a corresponding amino acid residue in another Cas9 polypeptide. In some embodiments, the deaminase (e.g., adenosine deaminase, cytidine deaminase, or adenosine deaminase and cytidine deaminase) is inserted to replace amino acid residue 768 as numbered in the above Cas9 reference sequence, or a corresponding amino acid residue in another Cas9 polypeptide.

[0348] In some embodiments, the deaminase (e.g., adenosine deaminase, cytidine deaminase, or adenosine deaminase and cytidine deaminase) is inserted at amino acid residue 791 or is inserted at amino acid residue 792, as numbered in the above Cas9 reference sequence, or a corresponding amino acid residue in another Cas9 polypeptide. In some embodiments, the deaminase (e.g., adenosine deaminase, cytidine deaminase, or adenosine deaminase and cytidine deaminase) is inserted at the N-terminus of amino acid residue 791 or is inserted at the N-terminus of amino acid 792, as numbered in the above Cas9 reference sequence, or a corresponding amino acid residue in another Cas9 polypeptide. In some embodiments, the deaminase (e.g., adenosine deaminase, cytidine deaminase, or adenosine deaminase and cytidine deaminase) is inserted at the C-terminus of amino acid 791 or is inserted at the N-terminus of amino acid 792, as numbered in the above Cas9 reference sequence, or a corresponding amino acid residue in another Cas9 polypeptide. In some embodiments, the deaminase (e.g., adenosine deaminase, cytidine deaminase, or adenosine deaminase and cytidine deaminase) is inserted to replace amino acid 791, or is inserted to replace amino acid 792, as numbered in the above Cas9 reference sequence, or a corresponding amino acid residue in another Cas9 polypeptide.

[0349] In some embodiments, the deaminase (e.g., adenosine deaminase, cytidine deaminase, or adenosine deaminase and cytidine deaminase) is inserted at amino acid residue 1016 as numbered in the above Cas9 reference sequence, or a corresponding amino acid residue in another Cas9 polypeptide. In some embodiments, the deaminase (e.g., adenosine deaminase, cytidine deaminase, or adenosine deaminase and cytidine deaminase) is inserted at the N-terminus of amino acid residue 1016 as numbered in the above Cas9 reference sequence, or a corresponding amino acid residue in another Cas9 polypeptide. In some embodiments, the deaminase (e.g., adenosine deaminase, cytidine deaminase, or adenosine deaminase and cytidine deaminase) is inserted at the C-terminus of amino acid residue 1016 as numbered in the above Cas9 reference sequence, or a corresponding amino acid residue in another Cas9 polypeptide. In some embodiments, the deaminase (e.g., adenosine deaminase, cytidine deaminase, or adenosine deaminase and cytidine deaminase) is inserted to replace amino acid residue 1016 as numbered in the above Cas9 reference sequence, or a corresponding amino acid residue in another Cas9 polypeptide.

[0350] In some embodiments, the deaminase (e.g., adenosine deaminase, cytidine deaminase, or adenosine deaminase and cytidine deaminase) is inserted at amino acid residue 1022, or is inserted at amino acid residue 1023, as numbered in the above Cas9 reference sequence, or a corresponding amino acid residue in another Cas9 polypeptide. In some embodiments, the deaminase (e.g., adenosine deaminase, cytidine deaminase, or adenosine deaminase and cytidine deaminase) is inserted at the N-terminus of amino acid residue 1022 or is inserted at the N-terminus of amino acid residue 1023, as numbered in the above Cas9 reference sequence, or a corresponding amino acid residue in another Cas9 polypeptide. In some embodiments, the deaminase (e.g., adenosine deaminase, cytidine deaminase, or adenosine deaminase and cytidine deaminase) is inserted at the C-terminus of amino acid residue 1022 or is inserted at the C-terminus of amino acid residue 1023, as numbered in the above Cas9 reference sequence, or a corresponding amino acid residue in another Cas9 polypeptide. In some embodiments, the deaminase (e.g., adenosine deaminase, cytidine deaminase, or adenosine deaminase and cytidine deaminase) is inserted to replace amino acid residue 1022, or is inserted to replace amino acid residue 1023, as numbered in the above Cas9 reference sequence, or a corresponding amino acid residue in another Cas9 polypeptide.

[0351] In some embodiments, the deaminase (e.g., adenosine deaminase, cytidine deaminase, or adenosine deaminase and cytidine deaminase) is inserted at amino acid residue 1026, or is inserted at amino acid residue 1029, as numbered in the above Cas9 reference sequence, or a corresponding amino acid residue in another Cas9 polypeptide. In some embodiments, the deaminase (e.g., adenosine deaminase, cytidine deaminase, or adenosine deaminase and cytidine deaminase) is inserted at the N-terminus of amino acid residue 1026 or is inserted at the N-terminus of amino acid residue 1029, as numbered in the above Cas9 reference sequence, or a corresponding amino acid residue in another Cas9 polypeptide. In some embodiments, the deaminase (e.g., adenosine deaminase, cytidine deaminase, or adenosine deaminase and cytidine deaminase) is inserted at the C-terminus of amino acid residue 1026 or is inserted at the C-terminus of amino acid residue 1029, as numbered in the above Cas9 reference sequence, or a corresponding amino acid residue in another Cas9 polypeptide. In some embodiments, the deaminase (e.g., adenosine deaminase, cytidine deaminase, or adenosine deaminase and cytidine deaminase) is inserted to replace amino acid residue 1026, or is inserted to replace amino acid residue 1029, as numbered in the above Cas9 reference sequence, or corresponding amino acid residue in another Cas9 polypeptide.

[0352] In some embodiments, the deaminase (e.g., adenosine deaminase, cytidine deaminase, or adenosine deaminase and cytidine deaminase) is inserted at amino acid residue 1040 as numbered in the above Cas9 reference sequence, or a corresponding amino acid residue in another Cas9 polypeptide. In some embodiments, the deaminase (e.g., adenosine deaminase, cytidine deaminase, or adenosine deaminase and cytidine deaminase) is inserted at the N-terminus of amino acid residue 1040 as numbered in the above Cas9 reference sequence, or a corresponding amino acid residue in another Cas9 polypeptide. In some embodiments, the deaminase (e.g., adenosine deaminase, cytidine deaminase, or adenosine deaminase and cytidine deaminase) is inserted at the C-terminus of amino acid residue 1040 as numbered in the above Cas9 reference sequence, or a corresponding amino acid residue in another Cas9 polypeptide. In some embodiments, the deaminase (e.g., adenosine deaminase, cytidine deaminase, or adenosine deaminase and cytidine deaminase) is inserted to replace amino acid residue 1040 as numbered in the above Cas9 reference sequence, or a corresponding amino acid residue in another Cas9 polypeptide.

[0353] In some embodiments, the deaminase (e.g., adenosine deaminase, cytidine deaminase, or adenosine deaminase and cytidine deaminase) is inserted at amino acid residue 1052, or is inserted at amino acid residue 1054, as numbered in the above Cas9 reference sequence, or a corresponding amino acid residue in another Cas9 polypeptide. In some embodiments, the deaminase (e.g., adenosine deaminase, cytidine deaminase, or adenosine deaminase and cytidine deaminase) is inserted at the N-terminus of amino acid residue 1052 or is inserted at the N-terminus of amino acid residue 1054, as numbered in the above Cas9 reference sequence, or a corresponding amino acid residue in another Cas9 polypeptide. In some embodiments, the deaminase (e.g., adenosine deaminase, cytidine deaminase, or adenosine deaminase and cytidine deaminase) is inserted at the C-terminus of amino acid residue 1052 or is inserted at the C-terminus of amino acid residue 1054, as numbered in the above Cas9 reference sequence, or a corresponding amino acid residue in another Cas9 polypeptide. In some embodiments, the deaminase (e.g., adenosine deaminase, cytidine deaminase, or adenosine deaminase and cytidine deaminase) is inserted to replace amino acid residue 1052, or is inserted to replace amino acid residue 1054, as numbered in the above Cas9 reference sequence, or a corresponding amino acid residue in another Cas9 polypeptide.

[0354] In some embodiments, the deaminase (e.g., adenosine deaminase, cytidine deaminase, or adenosine deaminase and cytidine deaminase) is inserted at amino acid residue 1067, or is inserted at amino acid residue 1068, or is inserted at amino acid residue 1069, as numbered in the above Cas9 reference sequence, or a corresponding amino acid residue in another Cas9 polypeptide. In some embodiments, the deaminase (e.g., adenosine deaminase, cytidine deaminase, or adenosine deaminase and cytidine deaminase) is inserted at the N-terminus of amino acid residue 1067 or is inserted at the N-terminus of amino acid residue 1068 or is inserted at the N-terminus of amino acid residue 1069, as numbered in the above Cas9 reference sequence, or a corresponding amino acid residue in another Cas9 polypeptide. In some embodiments, the deaminase (e.g., adenosine deaminase, cytidine deaminase, or adenosine deaminase and cytidine deaminase) is inserted at the C-terminus of amino acid residue 1067 or is inserted at the C-terminus of amino acid residue 1068 or is inserted at the C-terminus of amino acid residue 1069, as numbered in the above Cas9 reference sequence, or a corresponding amino acid residue in another Cas9 polypeptide. In some embodiments, the deaminase (e.g., adenosine deaminase, cytidine deaminase, or adenosine deaminase and cytidine deaminase) is inserted to replace amino acid residue 1067, or is inserted to replace amino acid residue 1068, or is inserted to replace amino acid residue 1069, as numbered in the above Cas9 reference sequence, or a corresponding amino acid residue in another Cas9 polypeptide.

[0355] In some embodiments, the deaminase (e.g., adenosine deaminase, cytidine deaminase, or adenosine deaminase and cytidine deaminase) is inserted at amino acid residue 1246, or is inserted at amino acid residue 1247, or is inserted at amino acid residue 1248, as numbered in the above Cas9 reference sequence, or a corresponding amino acid residue in another Cas9 polypeptide. In some embodiments, the deaminase (e.g., adenosine deaminase, cytidine deaminase, or adenosine deaminase and cytidine deaminase) is inserted at the N-terminus of amino acid residue 1246 or is inserted at the N-terminus of amino acid residue 1247 or is inserted at the N-terminus of amino acid residue 1248, as numbered in the above Cas9 reference sequence, or a corresponding amino acid residue in another Cas9 polypeptide. In some embodiments, the deaminase (e.g., adenosine deaminase, cytidine deaminase, or adenosine deaminase and cytidine deaminase) is inserted at the C-terminus of amino acid residue 1246 or is inserted at the C-terminus of amino acid residue 1247 or is inserted at the C-terminus of amino acid residue 1248, as numbered in the above Cas9 reference sequence, or a corresponding amino acid residue in another Cas9 polypeptide. In some embodiments, the deaminase (e.g., adenosine deaminase, cytidine deaminase, or adenosine deaminase and cytidine deaminase) is inserted to replace amino acid residue 1246, or is inserted to replace amino acid residue 1247, or is inserted to replace amino acid residue 1248, as numbered in the above Cas9 reference sequence, or a corresponding amino acid residue in another Cas9 polypeptide.

[0356] In some embodiments, a heterologous polypeptide (e.g., deaminase) is inserted in a flexible loop of a Cas9 polypeptide. The flexible loop portions can be selected from the group consisting of 530-537, 569-570, 686-691, 943-947, 1002-1025, 1052-1077, 1232-1247, or 1298-1300 as numbered in the above Cas9 reference sequence, or a corresponding amino acid residue in another Cas9 polypeptide. The flexible loop portions can be selected from the group consisting of: 1-529, 538-568, 580-685, 692-942, 948-1001, 1026-1051, 1078-1231, or 1248-1297 as numbered in the above Cas9 reference sequence, or a corresponding amino acid residue in another Cas9 polypeptide.

[0357] A heterologous polypeptide (e.g., adenine deaminase) can be inserted into a Cas9 polypeptide region corresponding to amino acid residues: 1017-1069, 1242-1247, 1052-1056, 1060-1077, 1002-1003, 943-947, 530-537, 568-579, 686-691, 1242-1247, 1298-1300, 1066-1077, 1052-1056, or 1060-1077 as numbered in the above Cas9 reference sequence, or a corresponding amino acid residue in another Cas9 polypeptide.

[0358] A heterologous polypeptide (e.g., adenine deaminase) can be inserted in place of a deleted region of a Cas9 polypeptide. The deleted region can correspond to an N-terminal or C-terminal portion of the Cas9 polypeptide. In some embodiments, the deleted region corresponds to residues 792-872 as numbered in the above Cas9 reference sequence, or a corresponding amino acid residue in another Cas9 polypeptide. In some embodiments, the deleted region corresponds to residues 792-906 as numbered in the above Cas9 reference sequence, or a corresponding amino acid residue in another Cas9 polypeptide. In some embodiments, the deleted region corresponds to residues 2-791 as numbered in the above Cas9 reference sequence, or a corresponding amino acid residue in another Cas9 polypeptide. In some embodiments, the deleted region corresponds to residues 1017-1069 as numbered in the above Cas9 reference sequence, or corresponding amino acid residues thereof.

[0359] Exemplary internal fusions base editors are provided in Table 3 below:

TABLE 3
Insertion loci in Cas9 proteins

| BE ID | Modification | Other ID |
|---|---|---|
| IBE001 | Cas9 TadA ins 1015 | ISLAY01 |
| IBE002 | Cas9 TadA ins 1022 | ISLAY02 |
| IBE003 | Cas9 TadA ins 1029 | ISLAY03 |
| IBE004 | Cas9 TadA ins 1040 | ISLAY04 |
| IBE005 | Cas9 TadA ins 1068 | ISLAY05 |
| IBE006 | Cas9 TadA ins 1247 | ISLAY06 |
| IBE007 | Cas9 TadA ins 1054 | ISLAY07 |
| IBE008 | Cas9 TadA ins 1026 | ISLAY08 |
| IBE009 | Cas9 TadA ins 768 | ISLAY09 |
| IBE020 | delta HNH TadA 792 | ISLAY20 |
| IBE021 | N-term fusion single TadA helix truncated 165-end | ISLAY21 |
| IBE029 | TadA-Circular Permutant116 ins1067 | ISLAY29 |
| IBE031 | TadA- Circular Permutant 136 ins1248 | ISLAY31 |
| IBE032 | TadA- Circular Permutant 136ins 1052 | ISLAY32 |
| IBE035 | delta 792-872 TadA ins | ISLAY35 |
| IBE036 | delta 792-906 TadA ins | ISLAY36 |
| IBE043 | TadA-Circular Permutant 65 ins1246 | ISLAY43 |
| IBE044 | TadA ins C-term truncate2 791 | ISLAY44 |

[0360] A heterologous polypeptide (e.g., deaminase) can be inserted within a structural or functional domain of a Cas9 polypeptide. A heterologous polypeptide (e.g., deaminase) can be inserted between two structural or functional domains of a Cas9 polypeptide. A heterologous polypeptide (e.g., deaminase) can be inserted in place of a structural or functional domain of a Cas9 polypeptide, for example, after deleting the domain from the Cas9 polypeptide. The structural or functional domains of a Cas9 polypeptide can include, for example, RuvC I, RuvC II, RuvC III, Rec1, Rec2, PI, or HNH.

[0361] In some embodiments, the Cas9 polypeptide lacks one or more domains selected from the group consisting of: RuvC I, RuvC II, RuvC III, Rec1, Rec2, PI, or HNH domain. In some embodiments, the Cas9 polypeptide lacks a nuclease domain. In some embodiments, the Cas9 polypeptide lacks an HNH domain. In some embodiments, the Cas9 polypeptide lacks a portion of the HNH domain such that the Cas9 polypeptide has reduced or abolished HNH activity. In some embodiments, the Cas9 polypeptide comprises a deletion of the nuclease domain, and the deaminase is inserted to replace the nuclease domain. In some embodiments, the HNH domain is deleted and the deaminase is inserted in its place. In some embodiments, one or more of the RuvC domains is deleted and the deaminase is inserted in its place.

[0362] A fusion protein comprising a heterologous polypeptide can be flanked by a N-terminal and a C-terminal fragment of a napDNAbp. In some embodiments, the fusion protein comprises a deaminase flanked by a N-terminal fragment and a C-terminal fragment of a Cas9 polypeptide. The N terminal fragment or the C terminal fragment can bind the target polynucleotide sequence. The C-terminus of the N terminal fragment or the N-terminus of the C terminal fragment can comprise a part of a flexible loop of a Cas9 polypeptide. The C-terminus of the N terminal fragment or the N-terminus of the C terminal fragment can comprise a part of an alpha-helix structure of the Cas9 polypeptide. The N-terminal fragment or the C-terminal fragment can comprise a DNA binding domain. The N-terminal fragment or the C-terminal fragment can comprise a RuvC domain. The N-terminal fragment or the C-terminal fragment can comprise an HNH domain. In some embodiments, neither of the N-terminal fragment and the C-terminal fragment comprises an HNH domain.

[0363] In some embodiments, the C-terminus of the N terminal Cas9 fragment comprises an amino acid that is in proximity to a target nucleobase when the fusion protein deaminates the target nucleobase. In some embodiments, the N-terminus of the C terminal Cas9 fragment comprises an amino acid that is in proximity to a target nucleobase when the fusion protein deaminates the target nucleobase. The insertion location of different deaminases can be different in order to have proximity between the target nucleobase and an amino acid in the C-terminus of the N terminal Cas9 fragment or the N-terminus of the C terminal Cas9 fragment. For example, the insertion position of an deaminase can be at an amino acid residue selected from the group consisting of: 1015, 1022, 1029, 1040, 1068, 1247, 1054, 1026, 768, 1067, 1248, 1052, and 1246 as numbered in the above Cas9 reference sequence, or a corresponding amino acid residue in another Cas9 polypeptide.

[0364] The N-terminal Cas9 fragment of a fusion protein (i.e. the N-terminal Cas9 fragment flanking the deaminase in a fusion protein) can comprise the N-terminus of a Cas9 polypeptide. The N-terminal Cas9 fragment of a fusion protein can comprise a length of at least about: 100, 200, 300, 400, 500, 600, 700, 800, 900, 1000, 1100, 1200, or 1300 amino acids. The N-terminal Cas9 fragment of a fusion protein can comprise a sequence corresponding to amino acid residues: 1-56, 1-95, 1-200, 1-300, 1-400, 1-500, 1-600, 1-700, 1-718, 1-765, 1-780, 1-906, 1-918, or 1-1100 as numbered in the above Cas9 reference sequence, or a corresponding amino acid residue in another Cas9 polypeptide. The N-terminal Cas9 fragment can comprise a sequence comprising at least: 85%, at least 90%, at least 91%, at least 92%, at least 93%, at least 94%, at least 95%, at least 96%, at least 97%, at least 98%, at least 99%, or at least 99.5% sequence identity to amino acid residues: 1-56, 1-95, 1-200, 1-300, 1-400, 1-500, 1-600, 1-700, 1-718, 1-765, 1-780, 1-906, 1-918, or 1-1100 as numbered in the above Cas9 reference sequence, or a corresponding amino acid residue in another Cas9 polypeptide.

[0365] The C-terminal Cas9 fragment of a fusion protein (i.e. the C-terminal Cas9 fragment flanking the deaminase in a fusion protein) can comprise the C-terminus of a Cas9 polypeptide. The C-terminal Cas9 fragment of a fusion protein can comprise a length of at least about: 100, 200, 300, 400, 500, 600, 700, 800, 900, 1000, 1100, 1200, or 1300 amino acids. The C-terminal Cas9 fragment of a fusion protein can comprise a sequence corresponding to amino acid residues: 1099-1368, 918-1368, 906-1368, 780-1368, 765-1368, 718-1368, 94-1368, or 56-1368 as numbered in the above Cas9 reference sequence, or a corresponding amino acid residue in another Cas9 polypeptide. The N-terminal Cas9 fragment can comprise a sequence comprising at least: 85%, at least 90%, at least 91%, at least 92%, at least 93%, at least 94%, at least 95%, at least 96%, at least 97%, at least 98%, at least 99%, or at least 99.5% sequence identity to amino acid residues: 1099-1368, 918-1368, 906-1368, 780-1368, 765-1368, 718-1368, 94-1368, or 56-1368 as numbered in the above Cas9 reference sequence, or a corresponding amino acid residue in another Cas9 polypeptide.

[0366] The N-terminal Cas9 fragment and C-terminal Cas9 fragment of a fusion protein taken together may not correspond to a full-length naturally occurring Cas9 polypeptide sequence, for example, as set forth in the above Cas9 reference sequence.

[0367] The fusion protein described herein can effect targeted deamination with reduced deamination at non-target sites (e.g., off-target sites), such as reduced genome wide spurious deamination. The fusion protein described herein can effect targeted deamination with reduced bystander deamination at non-target sites. The undesired deamination or off-target deamination can be reduced by at least 30%, at least 40%, at least 50%, at least 60%, at least 70%, at least 80%, at least 90%, at least 95%, or at least 99% compared with, for example, an end terminus fusion protein comprising the deaminase fused to a N terminus or a C terminus of a Cas9 polypeptide. The undesired deamination or off-target deamination can be reduced by at least one-fold, at least two-fold, at least three-fold, at least four-fold, at least five-fold, at least tenfold, at least fifteen fold, at least twenty fold, at least thirty fold, at least forty fold, at least fifty fold, at least 60 fold, at least 70 fold, at least 80 fold, at least 90 fold, or at least hundred fold, compared with, for example, an end terminus fusion protein comprising the deaminase fused to a N terminus or a C terminus of a Cas9 polypeptide.

[0368] In some embodiments, the deaminase (e.g., adenosine deaminase, cytidine deaminase, or adenosine deaminase and cytidine deaminase) of the fusion protein deaminates no more than two nucleobases within the range of an R-loop. In some embodiments, the deaminase of the fusion protein deaminates no more than three nucleobases within the range of the R-loop. In some embodiments, the deaminase of the fusion protein deaminates no more than 2, 3, 4, 5, 6, 7, 8, 9, or 10 nucleobases within the range of the R-loop. An R-loop is a three-stranded nucleic acid structure including a DNA:RNA hybrid, a DNA:DNA or an RNA: RNA complementary structure and the associated with single-stranded DNA. As used herein, an R-loop may be formed when a target polynucleotide is contacted with a CRISPR complex or a base editing complex, wherein a portion of a guide polynucleotide, e.g. a guide RNA, hybridizes with and displaces with a portion of a target polynucleotide, e.g. a target DNA. In some embodiments, an R-loop comprises a hybridized region of a spacer sequence and a target DNA complementary sequence. An R-loop region may be of about 5, 6, 7, 8, 9, 10, 11, 12, 13, 14, 15, 16, 17, 18, 19, 20, 21, 22, 23, 24, 25, 26, 27, 28, 29, 30, 31, 32, 33, 34, 35, 36, 37, 38, 39, 40, 41, 42, 43, 44, 45, 46, 47, 48, 49, or 50 nucleobase pairs in length. In some embodiments, the R-loop region is about 20 nucleobase pairs in length. It should be understood that, as used herein, an R-loop region is not limited to the target DNA strand that hybridizes with the guide polynucleotide. For example, editing of a target nucleobase within an R-loop region may be to a DNA strand that comprises the complementary strand to a guide RNA, or may be to a DNA strand that is the opposing strand of the strand complementary to the guide RNA. In some embodiments, editing in the region of the R-loop comprises editing a nucleobase on non-complementary strand (protospacer strand) to a guide RNA in a target DNA sequence.

[0369] The fusion protein described herein can effect target deamination in an editing window different from canonical base editing. In some embodiments, a target nucleobase is from about 1 to about 20 bases upstream of a PAM sequence in the target polynucleotide sequence. In some embodiments, a target nucleobase is from about 2 to about 12 bases upstream of a PAM sequence in the target polynucleotide sequence. In some embodiments, a target nucleobase is from about 1 to 9 base pairs, about 2 to 10 base pairs, about 3 to 11 base pairs, about 4 to 12 base pairs, about 5 to 13 base pairs, about 6 to 14 base pairs, about 7 to 15 base pairs, about 8 to 16 base pairs, about 9 to 17 base pairs, about 10 to 18 base pairs, about 11 to 19 base pairs, about 12 to 20 base pairs, about 1 to 7 base pairs, about 2 to 8 base pairs, about 3 to 9 base pairs, about 4 to 10 base pairs, about 5 to 11 base pairs, about 6 to 12 base pairs, about 7 to 13 base pairs, about 8 to 14 base pairs, about 9 to 15 base pairs, about 10 to 16 base pairs, about 11 to 17 base pairs, about 12 to 18 base pairs, about 13 to 19 base pairs, about 14 to 20 base pairs, about 1 to 5 base pairs, about 2 to 6 base pairs, about 3 to 7 base pairs, about 4 to 8 base pairs, about 5 to 9 base pairs, about 6 to 10 base pairs, about 7 to 11 base pairs, about 8 to 12 base pairs, about 9 to 13 base pairs, about 10 to 14 base pairs, about 11 to 15 base pairs, about 12 to 16 base pairs, about 13 to 17 base pairs, about 14 to 18 base pairs, about 15 to 19 base pairs, about 16 to 20 base pairs, about 1 to 3 base pairs, about 2 to 4 base pairs, about 3 to 5 base pairs, about 4 to 6 base pairs, about 5 to 7 base pairs, about 6 to 8 base pairs, about 7 to 9 base pairs, about 8 to 10 base pairs, about 9 to 11 base pairs, about 10 to 12 base pairs, about 11 to 13 base pairs, about 12 to 14 base pairs, about 13 to 15 base pairs, about 14 to 16 base pairs, about 15 to 17 base pairs, about 16 to 18 base pairs, about 17 to 19 base pairs, about 18 to 20 base pairs away or upstream of the PAM sequence. In some embodiments, a target nucleobase is about 1, 2, 3, 4, 5, 6, 7, 8, 9, 10, 11, 12, 13, 14, 15, 16, 17, 18, 19, 20, or more base pairs away from or upstream of the PAM sequence. In some embodiments, a target nucleobase is about 1, 2, 3, 4, 5, 6, 7, 8, or 9 base pairs upstream of the PAM sequence. In some embodiments, a target nucleobase is about 2, 3, 4, or 6 base pairs upstream of the PAM sequence.

[0370] The fusion protein can comprise more than one heterologous polypeptide. For example, the fusion protein can additionally comprise one or more UGI domains and/or one or more nuclear localization signals. The two or more heterologous domains can be inserted in tandem. The two or more heterologous domains can be inserted at locations such that they are not in tandem in the NapDNAbp.

[0371] A fusion protein can comprise a linker between the deaminase and the napDNAbp polypeptide. The linker can be a peptide or a non-peptide linker. For example, the linker can be an XTEN, (GGGS)n (SEQ ID NO: 1308), (GGGGS)n (SEQ ID NO: 109), (G)n, (EAAAK)n (SEQ ID NO: 1309), (GGS)n, SGSETPGTSESATPES (SEQ ID NO: 56). In some embodiments, the fusion protein comprises a linker between the N-terminal Cas9 fragment and the deaminase. In some embodiments, the fusion protein comprises a linker between the C-terminal Cas9 fragment and the deaminase. In some embodiments, the N-terminal and C-terminal fragments of napDNAbp are connected to the deaminase with a linker. In some embodiments, the N-terminal and C-terminal fragments are joined to the deaminase domain without a linker. In some embodiments, the fusion protein comprises a linker between the N-terminal Cas9 fragment and the deaminase, but does not comprise a linker between the C-terminal Cas9 fragment and the deaminase. In some embodiments, the fusion protein comprises a linker between the C-terminal Cas9 fragment and the deaminase, but does not comprise a linker between the N-terminal Cas9 fragment and the deaminase.

[0372] In some embodiments, the napDNAbp in the fusion protein is a Cas12 polypeptide, e.g., Cas12b/C2c1, or a fragment thereof. The Cas12 polypeptide can be a variant Cas12 polypeptide. In other embodiments, the N- or C-terminal fragments of the Cas12 polypeptide comprise a nucleic acid programmable DNA binding domain or a RuvC domain. In other embodiments, the fusion protein contains a linker between the Cas12 polypeptide and the catalytic domain. In other embodiments, the amino acid sequence of the linker is GGSGGS (SEQ ID NO: 273) or GSSGSETPGTSESATPESSG (SEQ ID NO: 1310). In other embodiments, the linker is a rigid linker. In other embodiments of the above aspects, the linker is encoded by

(SEQ ID NO: 1311)
GGAGGCTCTGGAGGAAGC
or
(SEQ ID NO: 1312)
GGCTCTTCTGGATCTGAAACACCTGGCACAAGCGAGAGCGCCACCCCTGA
GAGCTCTGGC.

[0373] Fusion proteins comprising a heterologous catalytic domain flanked by N- and C-terminal fragments of a Cas12 polypeptide are also useful for base editing in the methods as described herein. Fusion proteins comprising Cas12 and one or more deaminase domains, e.g., adenosine deaminase, or comprising an adenosine deaminase domain flanked by Cas12 sequences are also useful for highly specific and efficient base editing of target sequences. In an embodiment, a chimeric Cas12 fusion protein contains a heterologous catalytic domain (e.g., adenosine deaminase, cytidine deaminase, or adenosine deaminase and cytidine deaminase) inserted within a Cas12 polypeptide. In some embodiments, the fusion protein comprises an adenosine deaminase domain and a cytidine deaminase domain inserted within a Cas12. In some embodiments, an adenosine deaminase is fused within Cas12 and a cytidine deaminase is fused to the C-terminus. In some embodiments, an adenosine deaminase is fused within Cas12 and a cytidine deaminase fused to the N-terminus. In some embodiments, a cytidine deaminase is fused within Cas12 and an adenosine deaminase is fused to the C-terminus. In some embodiments, a cytidine deaminase is fused within Cas12 and an adenosine deaminase fused to the N-terminus. Exemplary structures of a fusion protein with an adenosine deaminase and a cytidine deaminase and a Cas12 are provided as follows:

[0374] NH2-[Cas12(adenosine deaminase)]-[cytidine deaminase]-COOH;

[0375] NH2-[cytidine deaminase]-[Cas12(adenosine deaminase)]-COOH;

[0376] NH2-[Cas12(cytidine deaminase)]-[adenosine deaminase]-COOH; or

[0377] NH2-[adenosine deaminase]-[Cas12(cytidine deaminase)]-COOH;

[0378] In some embodiments, the “-” used in the general architecture above indicates the presence of an optional linker.

[0379] In various embodiments, the catalytic domain has DNA modifying activity (e.g., deaminase activity), such as adenosine deaminase activity. In some embodiments, the adenosine deaminase is a TadA (e.g., TadA*7.10). In some embodiments, the TadA is a TadA*8. In some embodiments, a TadA*8 is fused within Cas12 and a cytidine deaminase is fused to the C-terminus. In some embodiments, a TadA*8 is fused within Cas12 and a cytidine deaminase fused to the N-terminus. In some embodiments, a cytidine deaminase is fused within Cas12 and a TadA*8 is fused to the C-terminus. In some embodiments, a cytidine deaminase is fused within Cas12 and a TadA*8 fused to the N-terminus. Exemplary structures of a fusion protein with a TadA*8 and a cytidine deaminase and a Cas12 are provided as follows:

[0380] N-[Cas12(TadA*8)]-[cytidine deaminase]-C;

[0381] N-[cytidine deaminase]-[Cas12(TadA*8)]-C;

[0382] N-[Cas12(cytidine deaminase)]-[TadA*8]-C; or

[0383] N-[TadA*8]-[Cas12(cytidine deaminase)]-C.

[0384] In some embodiments, the “-” used in the general architecture above indicates the presence of an optional linker.

[0385] In other embodiments, the fusion protein contains one or more catalytic domains. In other embodiments, at least one of the one or more catalytic domains is inserted within the Cas12 polypeptide or is fused at the Cas12 N-terminus or C-terminus. In other embodiments, at least one of the one or more catalytic domains is inserted within a loop, an alpha helix region, an unstructured portion, or a solvent accessible portion of the Cas12 polypeptide. In other embodiments, the Cas12 polypeptide is Cas12a, Cas12b, Cas12c, Cas12d, Cas12e, Cas12g, Cas12h, Cas12i, or Cas12j/Casϕ. In other embodiments, the Cas12 polypeptide has at least about 85% amino acid sequence identity to Bacillus hisashii Cas12b, Bacillus thermoamylovorans Cas12b, Bacillus sp. V3-13 Cas12b, or Alicyclobacillus acidiphilus Cas12b (SEQ ID NO: 259). In other embodiments, the Cas12 polypeptide has at least about 90% amino acid sequence identity to Bacillus hisashii Cas12b (SEQ ID NO: 260), Bacillus thermoamylovorans Cas12b, Bacillus sp. V3-13 Cas12b, or Alicyclobacillus acidiphilus Cas12b. In other embodiments, the Cas12 polypeptide has at least about 95% amino acid sequence identity to Bacillus hisashii Cas12b, Bacillus thermoamylovorans Cas12b (SEQ ID NO: 265), Bacillus sp. V3-13 Cas12b (SEQ ID NO: 264), or Alicyclobacillus acidiphilus Cas12b. In other embodiments, the Cas12 polypeptide contains or consists essentially of a fragment of Bacillus hisashii Cas12b, Bacillus thermoamylovorans Cas12b, Bacillus sp. V3-13 Cas12b, or Alicyclobacillus acidiphilus Cas12b. In embodiments, the Cas12 polypeptide contains BvCas12b (V4), which in some embodiments is expressed as 5′ mRNA Cap-5′ UTR-bhCas12b-STOP sequence-3′ UTR 120polyA tail (SEQ ID NOs: 261-263).

[0386] In other embodiments, the catalytic domain is inserted between amino acid positions 153-154, 255-256, 306-307, 980-981, 1019-1020, 534-535, 604-605, or 344-345 of BhCas12b or a corresponding amino acid residue of Cas12a, Cas12c, Cas12d, Cas12e, Cas12g, Cas12h, Cas12i, or Cas12j/Casϕ. In other embodiments, the catalytic domain is inserted between amino acids P153 and S154 of BhCas12b. In other embodiments, the catalytic domain is inserted between amino acids K255 and E256 of BhCas12b. In other embodiments, the catalytic domain is inserted between amino acids D980 and G981 of BhCas12b. In other embodiments, the catalytic domain is inserted between amino acids K1019 and L1020 of BhCas12b. In other embodiments, the catalytic domain is inserted between amino acids F534 and P535 of BhCas12b. In other embodiments, the catalytic domain is inserted between amino acids K604 and G605 of BhCas12b. In other embodiments, the catalytic domain is inserted between amino acids H344 and F345 of BhCas12b. In other embodiments, catalytic domain is inserted between amino acid positions 147 and 148, 248 and 249, 299 and 300, 991 and 992, or 1031 and 1032 of BvCas12b or a corresponding amino acid residue of Cas12a, Cas12c, Cas12d, Cas12e, Cas12g, Cas12h, Cas12i, or Cas12j/Casϕ. In other embodiments, the catalytic domain is inserted between amino acids P147 and D148 of BvCas12b. In other embodiments, the catalytic domain is inserted between amino acids G248 and G249 of BvCas12b. In other embodiments, the catalytic domain is inserted between amino acids P299 and E300 of BvCas12b. In other embodiments, the catalytic domain is inserted between amino acids G991 and E992 of BvCas12b. In other embodiments, the catalytic domain is inserted between amino acids K1031 and M1032 of BvCas12b. In other embodiments, the catalytic domain is inserted between amino acid positions 157 and 158, 258 and 259, 310 and 311, 1008 and 1009, or 1044 and 1045 of AaCas12b or a corresponding amino acid residue of Cas12a, Cas12c, Cas12d, Cas12e, Cas12g, Cas12h, Cas12i, or Cas12j/Casϕ. In other embodiments, the catalytic domain is inserted between amino acids P157 and G158 of AaCas12b. In other embodiments, the catalytic domain is inserted between amino acids V258 and G259 of AaCas12b. In other embodiments, the catalytic domain is inserted between amino acids D310 and P311 of AaCas12b. In other embodiments, the catalytic domain is inserted between amino acids G1008 and E1009 of AaCas12b. In other embodiments, the catalytic domain is inserted between amino acids G1044 and K1045 at of AaCas12b.

[0387] In other embodiments, the fusion protein contains a nuclear localization signal (e.g., a bipartite nuclear localization signal). In other embodiments, the amino acid sequence of the nuclear localization signal is MAPKKKRKVGIHGVPAA (SEQ ID NO: 1313). In other embodiments of the above aspects, the nuclear localization signal is encoded by the following sequence:

[0388] ATGGCCCCAAAGAAGAAGCGGAAGGTCGGTATCCACGGAGTCCCAGCAGCC (SEQ ID NO: 1314). In other embodiments, the Cas12b polypeptide contains a mutation that silences the catalytic activity of a RuvC domain. In other embodiments, the Cas12b polypeptide contains D574A, D829A and/or D952A mutations. In other embodiments, the fusion protein further contains a tag (e.g., an influenza hemagglutinin tag).

[0389] In some embodiments, the fusion protein comprises a napDNAbp domain (e.g., Cas12-derived domain) with an internally fused nucleobase editing domain (e.g., all or a portion of a deaminase domain, e.g., an adenosine deaminase domain). In some embodiments, the napDNAbp is a Cas12b. In some embodiments, the base editor comprises a BhCas12b domain with an internally fused TadA*8 domain inserted at the loci provided in Table 4 below.

TABLE 4
Insertion loci in Cas12b proteins

| | Insertion site | Inserted between aa |
|---|---|---|
| BhCas12b | | |
| position 1 | 153 | PS |
| position 2 | 255 | KE |
| position 3 | 306 | DE |
| position 4 | 980 | DG |
| position 5 | 1019 | KL |
| position 6 | 534 | FP |
| position 7 | 604 | KG |
| position 8 | 344 | HF |
| BvCas12b | | |
| position 1 | 147 | PD |
| position 2 | 248 | GG |
| position 3 | 299 | PE |
| position 4 | 991 | GE |
| position 5 | 1031 | KM |
| AaCas12b | | |
| position 1 | 157 | PG |
| position 2 | 258 | VG |
| position 3 | 310 | DP |
| position 4 | 1008 | GE |
| position 5 | 1044 | GK |

[0390] By way of nonlimiting example, an adenosine deaminase (e.g., TadA*8.13) may be inserted into a BhCas12b to produce a fusion protein (e.g., TadA*8.13-BhCas12b) that effectively edits a nucleic acid sequence.

[0391] In some embodiments, the base editing system described herein is an ABE with TadA inserted into a Cas9. Polypeptide sequences of relevant ABEs with TadA inserted into a Cas9 are provided in the attached Sequence Listing as SEQ ID NOs: 1315-1360.

[0392] In some embodiments, adenosine deaminase base editors were generated to insert TadA or variants thereof into the Cas9 polypeptide at the identified positions.

[0393] Exemplary, yet nonlimiting, fusion proteins are described in International PCT Application Nos. PCT/US2020/016285 and U.S. Provisional Application Nos. 62/852,228 and 62/852,224, the contents of which are incorporated by reference herein in their entireties.

### A to G Editing

[0394] In some embodiments, a base editor described herein comprises an adenosine deaminase domain. Such an adenosine deaminase domain of a base editor can facilitate the editing of an adenine (A) nucleobase to a guanine (G) nucleobase by deaminating the A to form inosine (I), which exhibits base pairing properties of G. Adenosine deaminase is capable of deaminating (i.e., removing an amine group) adenine of a deoxyadenosine residue in deoxyribonucleic acid (DNA). In some embodiments, an A-to-G base editor further comprises an inhibitor of inosine base excision repair, for example, a uracil glycosylase inhibitor (UGI) domain or a catalytically inactive inosine specific nuclease. Without wishing to be bound by any particular theory, the UGI domain or catalytically inactive inosine specific nuclease can inhibit or prevent base excision repair of a deaminated adenosine residue (e.g., inosine), which can improve the activity or efficiency of the base editor.

[0395] A base editor comprising an adenosine deaminase can act on any polynucleotide, including DNA, RNA and DNA-RNA hybrids. In certain embodiments, a base editor comprising an adenosine deaminase can deaminate a target A of a polynucleotide comprising RNA. For example, the base editor can comprise an adenosine deaminase domain capable of deaminating a target A of an RNA polynucleotide and/or a DNA-RNA hybrid polynucleotide. In an embodiment, an adenosine deaminase incorporated into a base editor comprises all or a portion of adenosine deaminase acting on RNA (ADAR, e.g., ADAR1 or ADAR2) or tRNA (ADAT). A base editor comprising an adenosine deaminase domain can also be capable of deaminating an A nucleobase of a DNA polynucleotide. In an embodiment an adenosine deaminase domain of a base editor comprises all or a portion of an ADAT comprising one or more mutations which permit the ADAT to deaminate a target A in DNA. For example, the base editor can comprise all or a portion of an ADAT from Escherichia coli (EcTadA) comprising one or more of the following mutations: D108N, A106V, D147Y, E155V, L84F, H123Y, I156F, or a corresponding mutation in another adenosine deaminase. Exemplary ADAT homolog polypeptide sequences are provided in the Sequence Listing as SEQ ID NOs: 1363-1370.

[0396] The adenosine deaminase can be derived from any suitable organism (e.g., E. coli). In some embodiments, the adenosine deaminase is from a prokaryote. In some embodiments, the adenosine deaminase is from a bacterium. In some embodiments, the adenosine deaminase is from Escherichia coli, Staphylococcus aureus, Salmonella typhi, Shewanella putrefaciens, Haemophilus influenzae, Caulobacter crescentus, or Bacillus subtilis. In some embodiments, the adenosine deaminase is from E. coli. In some embodiments, the adenine deaminase is a naturally-occurring adenosine deaminase that includes one or more mutations corresponding to any of the mutations provided herein (e.g., mutations in ecTadA). The corresponding residue in any homologous protein can be identified by e.g., sequence alignment and determination of homologous residues. The mutations in any naturally-occurring adenosine deaminase (e.g., having homology to ecTadA) that correspond to any of the mutations described herein (e.g., any of the mutations identified in ecTadA) can be generated accordingly.

[0397] In some embodiments, the adenosine deaminase comprises an amino acid sequence that is at least 60%, at least 65%, at least 70%, at least 75%, at least 80%, at least 85%, at least 90%, at least 95%, at least 96%, at least 97%, at least 98%, at least 99%, or at least 99.5% identical to any one of the amino acid sequences set forth in any of the adenosine deaminases provided herein. It should be appreciated that adenosine deaminases provided herein may include one or more mutations (e.g., any of the mutations provided herein). The disclosure provides any deaminase domains with a certain percent identify plus any of the mutations or combinations thereof described herein. In some embodiments, the adenosine deaminase comprises an amino acid sequence that has 1, 2, 3, 4, 5, 6, 7, 8, 9, 10, 11, 12, 13, 14, 15, 16, 17, 18, 19, 20, 21, 22, 21, 24, 25, 26, 27, 28, 29, 30, 31, 32, 33, 34, 35, 36, 37, 38, 39, 40, 41, 42, 43, 44, 45, 46, 47, 48, 49, 50, or more mutations compared to a reference sequence, or any of the adenosine deaminases provided herein. In some embodiments, the adenosine deaminase comprises an amino acid sequence that has at least 5, at least 10, at least 15, at least 20, at least 25, at least 30, at least 35, at least 40, at least 45, at least 50, at least 60, at least 70, at least 80, at least 90, at least 100, at least 110, at least 120, at least 130, at least 140, at least 150, at least 160, or at least 170 identical contiguous amino acid residues as compared to any one of the amino acid sequences known in the art or described herein.

[0398] It should be appreciated that any of the mutations provided herein (e.g., based on the TadA reference sequence) can be introduced into other adenosine deaminases, such as E. coli TadA (ecTadA), S. aureus TadA (saTadA), or other adenosine deaminases (e.g., bacterial adenosine deaminases). It would be apparent to the skilled artisan that additional deaminases may similarly be aligned to identify homologous amino acid residues that can be mutated as provided herein. Thus, any of the mutations identified in the TadA reference sequence can be made in other adenosine deaminases (e.g., ecTada) that have homologous amino acid residues. It should also be appreciated that any of the mutations provided herein can be made individually or in any combination in the TadA reference sequence or another adenosine deaminase.

[0399] In some embodiments, the adenosine deaminase comprises a D108X mutation in the TadA reference sequence, or a corresponding mutation in another adenosine deaminase, where X indicates any amino acid other than the corresponding amino acid in the wild-type adenosine deaminase. In some embodiments, the adenosine deaminase comprises a D108G, D108N, D108V, D108A, or D108Y mutation in TadA reference sequence, or a corresponding mutation in another adenosine deaminase. It should be appreciated, however, that additional deaminases may similarly be aligned to identify homologous amino acid residues that can be mutated as provided herein.

[0400] In some embodiments, the adenosine deaminase comprises an A106X mutation in TadA reference sequence, or a corresponding mutation in another adenosine deaminase, where X indicates any amino acid other than the corresponding amino acid in the wild-type adenosine deaminase. In some embodiments, the adenosine deaminase comprises an A106V mutation in TadA reference sequence, or a corresponding mutation in another adenosine deaminase (e.g., ecTadA).

[0401] In some embodiments, the adenosine deaminase comprises a E155X mutation in TadA reference sequence, or a corresponding mutation in another adenosine deaminase, where the presence of X indicates any amino acid other than the corresponding amino acid in the wild-type adenosine deaminase. In some embodiments, the adenosine deaminase comprises a E155D, E155G, or E155V mutation in TadA reference sequence, or a corresponding mutation in another adenosine deaminase (e.g., ecTadA).

[0402] In some embodiments, the adenosine deaminase comprises a D147X mutation in TadA reference sequence, or a corresponding mutation in another adenosine deaminase, where the presence of X indicates any amino acid other than the corresponding amino acid in the wild-type adenosine deaminase. In some embodiments, the adenosine deaminase comprises a D147Y, mutation in TadA reference sequence, or a corresponding mutation in another adenosine deaminase (e.g., ecTadA).

[0403] In some embodiments, the adenosine deaminase comprises an A106X, E155X, or D147X, mutation in the TadA reference sequence, or a corresponding mutation in another adenosine deaminase (e.g., ecTadA), where X indicates any amino acid other than the corresponding amino acid in the wild-type adenosine deaminase. In some embodiments, the adenosine deaminase comprises an E155D, E155G, or E155V mutation. In some embodiments, the adenosine deaminase comprises a D147Y.

[0404] It should also be appreciated that any of the mutations provided herein may be made individually or in any combination in ecTadA or another adenosine deaminase. For example, an adenosine deaminase may contain a D108N, a A106V, a E155V, and/or a D147Y mutation in TadA reference sequence, or a corresponding mutation in another adenosine deaminase (e.g., ecTadA). In some embodiments, an adenosine deaminase comprises the following group of mutations (groups of mutations are separated by a “;”) in TadA reference sequence, or corresponding mutations in another adenosine deaminase: D108N and A106V; D108N and E155V; D108N and D147Y; A106V and E155V; A106V and D147Y; E155V and D147Y; D108N, A106V, and E155V; D108N, A106V, and D147Y; D108N, E155V, and D147Y; A106V, E155V, and D147Y; and D108N, A106V, E155V, and D147Y. It should be appreciated, however, that any combination of corresponding mutations provided herein may be made in an adenosine deaminase (e.g., ecTadA).

[0405] In some embodiments, the adenosine deaminase comprises one or more of a H8X, T17X, L18X, W23X, L34X, W45X, R51X, A56X, E59X, E85X, M94X, 195X, V102X, F104X, A106X, R107X, D108X, K110X, M118X, N127X, A138X, F149X, M151X, R153X, Q154X, I156X, and/or K157X mutation in TadA reference sequence, or one or more corresponding mutations in another adenosine deaminase, where the presence of X indicates any amino acid other than the corresponding amino acid in the wild-type adenosine deaminase. In some embodiments, the adenosine deaminase comprises one or more of H8Y, T17S, L18E, W23L, L34S, W45L, R51H, A56E, or A56S, E59G, E85K, or E85G, M94L, 195L, V102A, F104L, A106V, R107C, or R107H, or R107P, D108G, or D108N, or D108V, or D108A, or D108Y, K110I, M118K, N127S, A138V, F149Y, M151V, R153C, Q154L, 1156D, and/or K157R mutation in TadA reference sequence, or one or more corresponding mutations in another adenosine deaminase.

[0406] In some embodiments, the adenosine deaminase comprises one or more of a H8X, D108X, and/or N127X mutation in TadA reference sequence, or one or more corresponding mutations in another adenosine deaminase, where X indicates the presence of any amino acid. In some embodiments, the adenosine deaminase comprises one or more of a H8Y, D108N, and/or N127S mutation in TadA reference sequence, or one or more corresponding mutations in another adenosine deaminase.

[0407] In some embodiments, the adenosine deaminase comprises one or more of H8X, R26X, M61X, L68X, M70X, A106X, D108X, A109X, N127X, D147X, R152X, Q154X, E155X, K161X, Q163X, and/or T166X mutation in TadA reference sequence, or one or more corresponding mutations in another adenosine deaminase, where X indicates the presence of any amino acid other than the corresponding amino acid in the wild-type adenosine deaminase. In some embodiments, the adenosine deaminase comprises one or more of H8Y, R26W, M611, L68Q, M70V, A106T, D108N, A109T, N127S, D147Y, R152C, Q154H or Q154R, E155G or E155V or E155D, K161Q, Q163H, and/or T166P mutation in TadA reference sequence, or one or more corresponding mutations in another adenosine deaminase.

[0408] In some embodiments, the adenosine deaminase comprises one, two, three, four, five, or six mutations selected from the group consisting of H8X, D108X, N127X, D147X, R152X, and Q154X in TadA reference sequence, or a corresponding mutation or mutations in another adenosine deaminase (e.g., ecTadA), where X indicates the presence of any amino acid other than the corresponding amino acid in the wild-type adenosine deaminase. In some embodiments, the adenosine deaminase comprises one, two, three, four, five, six, seven, or eight mutations selected from the group consisting of H8X, M61X, M70X, D108X, N127X, Q154X, E155X, and Q163X in TadA reference sequence, or a corresponding mutation or mutations in another adenosine deaminase (e.g., ecTadA), where X indicates the presence of any amino acid other than the corresponding amino acid in the wild-type adenosine deaminase. In some embodiments, the adenosine deaminase comprises one, two, three, four, or five, mutations selected from the group consisting of H8X, D108X, N127X, E155X, and T166X in TadA reference sequence, or a corresponding mutation or mutations in another adenosine deaminase (e.g., ecTadA), where X indicates the presence of any amino acid other than the corresponding amino acid in the wild-type adenosine deaminase.

[0409] In some embodiments, the adenosine deaminase comprises one, two, three, four, five, or six mutations selected from the group consisting of H8X, A106X, and D108X, or a corresponding mutation or mutations in another adenosine deaminase, where X indicates the presence of any amino acid other than the corresponding amino acid in the wild-type adenosine deaminase. In some embodiments, the adenosine deaminase comprises one, two, three, four, five, six, seven, or eight mutations selected from the group consisting of H8X, R26X, L68X, D108X, N127X, D147X, and E155X, or a corresponding mutation or mutations in another adenosine deaminase, where X indicates the presence of any amino acid other than the corresponding amino acid in the wild-type adenosine deaminase.

[0410] In some embodiments, the adenosine deaminase comprises one, two, three, four, five, six, or seven mutations selected from the group consisting of H8X, R126X, L68X, D108X, N127X, D147X, and E155X in TadA reference sequence, or a corresponding mutation or mutations in another adenosine deaminase, where X indicates the presence of any amino acid other than the corresponding amino acid in the wild-type adenosine deaminase. In some embodiments, the adenosine deaminase comprises one, two, three, four, or five mutations selected from the group consisting of H8X, D108X, A109X, N127X, and E155X in TadA reference sequence, or a corresponding mutation or mutations in another adenosine deaminase, where X indicates the presence of any amino acid other than the corresponding amino acid in the wild-type adenosine deaminase.

[0411] In some embodiments, the adenosine deaminase comprises one, two, three, four, five, or six mutations selected from the group consisting of H8Y, D108N, N127S, D147Y, R152C, and Q154H in TadA reference sequence, or a corresponding mutation or mutations in another adenosine deaminase (e.g., ecTadA). In some embodiments, the adenosine deaminase comprises one, two, three, four, five, six, seven, or eight mutations selected from the group consisting of H8Y, M611, M70V, D108N, N127S, Q154R, E155G and Q163H in TadA reference sequence, or a corresponding mutation or mutations in another adenosine deaminase (e.g., ecTadA). In some embodiments, the adenosine deaminase comprises one, two, three, four, or five, mutations selected from the group consisting of H8Y, D108N, N127S, E155V, and T166P in TadA reference sequence, or a corresponding mutation or mutations in another adenosine deaminase (e.g., ecTadA). In some embodiments, the adenosine deaminase comprises one, two, three, four, five, or six mutations selected from the group consisting of H8Y, A106T, D108N, N127S, E155D, and K161Q in TadA reference sequence, or a corresponding mutation or mutations in another adenosine deaminase (e.g., ecTadA). In some embodiments, the adenosine deaminase comprises one, two, three, four, five, six, seven, or eight mutations selected from the group consisting of H8Y, R26W, L68Q, D108N, N127S, D147Y, and E155V in TadA reference sequence, or a corresponding mutation or mutations in another adenosine deaminase (e.g., ecTadA). In some embodiments, the adenosine deaminase comprises one, two, three, four, or five, mutations selected from the group consisting of H8Y, D108N, A109T, N127S, and E155G in TadA reference sequence, or a corresponding mutation or mutations in another adenosine deaminase (e.g., ecTadA).

[0412] In some embodiments, the adenosine deaminase comprises one or more of the or one or more corresponding mutations in another adenosine deaminase. In some embodiments, the adenosine deaminase comprises a D108N, D108G, or D108V mutation in TadA reference sequence, or corresponding mutations in another adenosine deaminase. In some embodiments, the adenosine deaminase comprises a A106V and D108N mutation in TadA reference sequence, or corresponding mutations in another adenosine deaminase. In some embodiments, the adenosine deaminase comprises R107C and D108N mutations in TadA reference sequence, or corresponding mutations in another adenosine deaminase. In some embodiments, the adenosine deaminase comprises a H8Y, D108N, N127S, D147Y, and Q154H mutation in TadA reference sequence, or corresponding mutations in another adenosine deaminase. In some embodiments, the adenosine deaminase comprises a H8Y, D108N, N127S, D147Y, and E155V mutation in TadA reference sequence, or corresponding mutations in another adenosine deaminase. In some embodiments, the adenosine deaminase comprises a D108N, D147Y, and E155V mutation in TadA reference sequence, or corresponding mutations in another adenosine deaminase. In some embodiments, the adenosine deaminase comprises a H8Y, D108N, and N127S mutation in TadA reference sequence, or corresponding mutations in another adenosine deaminase. In some embodiments, the adenosine deaminase comprises a A106V, D108N, D147Y, and E155V mutation in TadA reference sequence, or corresponding mutations in another adenosine deaminase (e.g., ecTadA).

[0413] In some embodiments, the adenosine deaminase comprises one or more of S2X, H8X, I49X, L84X, H123X, N127X, I156X, and/or K160X mutation in TadA reference sequence, or one or more corresponding mutations in another adenosine deaminase, where the presence of X indicates any amino acid other than the corresponding amino acid in the wild-type adenosine deaminase. In some embodiments, the adenosine deaminase comprises one or more of S2A, H8Y, I49F, L84F, H123Y, N127S, I156F, and/or K160S mutation in TadA reference sequence, or one or more corresponding mutations in another adenosine deaminase (e.g., ecTadA).

[0414] In some embodiments, the adenosine deaminase comprises an L84X mutation adenosine deaminase, where X indicates any amino acid other than the corresponding amino acid in the wild-type adenosine deaminase. In some embodiments, the adenosine deaminase comprises an L84F mutation in TadA reference sequence, or a corresponding mutation in another adenosine deaminase (e.g., ecTadA).

[0415] In some embodiments, the adenosine deaminase comprises an H123X mutation in TadA reference sequence, or a corresponding mutation in another adenosine deaminase, where X indicates any amino acid other than the corresponding amino acid in the wild-type adenosine deaminase. In some embodiments, the adenosine deaminase comprises an H123Y mutation in TadA reference sequence, or a corresponding mutation in another adenosine deaminase.

[0416] In some embodiments, the adenosine deaminase comprises an I156X mutation in TadA reference sequence, or a corresponding mutation in another adenosine deaminase, where X indicates any amino acid other than the corresponding amino acid in the wild-type adenosine deaminase. In some embodiments, the adenosine deaminase comprises an I156F mutation in TadA reference sequence, or a corresponding mutation in another adenosine deaminase.

[0417] In some embodiments, the adenosine deaminase comprises one, two, three, four, five, six, or seven mutations selected from the group consisting of L84X, A106X, D108X, H123X, D147X, E155X, and I156X in TadA reference sequence, or a corresponding mutation or mutations in another adenosine deaminase, where X indicates the presence of any amino acid other than the corresponding amino acid in the wild-type adenosine deaminase. In some embodiments, the adenosine deaminase comprises one, two, three, four, five, or six mutations selected from the group consisting of S2X, I49X, A106X, D108X, D147X, and E155X in TadA reference sequence, or a corresponding mutation or mutations in another adenosine deaminase, where X indicates the presence of any amino acid other than the corresponding amino acid in the wild-type adenosine deaminase. In some embodiments, the adenosine deaminase comprises one, two, three, four, or five mutations selected from the group consisting of H8X, A106X, D108X, N127X, and K160X in TadA reference sequence, or a corresponding mutation or mutations in another adenosine deaminase, where X indicates the presence of any amino acid other than the corresponding amino acid in the wild-type adenosine deaminase.

[0418] In some embodiments, the adenosine deaminase comprises one, two, three, four, five, six, or seven mutations selected from the group consisting of L84F, A106V, D108N, H123Y, D147Y, E155V, and I156F in TadA reference sequence, or a corresponding mutation or mutations in another adenosine deaminase. In some embodiments, the adenosine deaminase comprises one, two, three, four, five, or six mutations selected from the group consisting of S2A, I49F, A106V, D108N, D147Y, and E155V in TadA reference sequence.

[0419] In some embodiments, the adenosine deaminase comprises one, two, three, four, or five mutations selected from the group consisting of H8Y, A106T, D108N, N127S, and K160S in TadA reference sequence, or a corresponding mutation or mutations in another adenosine deaminase.

[0420] In some embodiments, the adenosine deaminase comprises one or more of a E25X, R26X, R107X, A142X, and/or A143X mutation in TadA reference sequence, or one or more corresponding mutations in another adenosine deaminase, where the presence of X indicates any amino acid other than the corresponding amino acid in the wild-type adenosine deaminase. In some embodiments, the adenosine deaminase comprises one or more of E25M, E25D, E25A, E25R, E25V, E25S, E25Y, R26G, R26N, R26Q, R26C, R26L, R26K, R107P, R107K, R107A, R107N, R107W, R107H, R107S, A142N, A142D, A142G, A143D, A143G, A143E, A143L, A143W, A143M, A143S, A143Q, and/or A143R mutation in TadA reference sequence, or one or more corresponding mutations in another adenosine deaminase. In some embodiments, the adenosine deaminase comprises one or more of the mutations described herein corresponding to TadA reference sequence, or one or more corresponding mutations in another adenosine deaminase.

[0421] In some embodiments, the adenosine deaminase comprises an E25X mutation in TadA reference sequence, or a corresponding mutation in another adenosine deaminase, where X indicates any amino acid other than the corresponding amino acid in the wild-type adenosine deaminase. In some embodiments, the adenosine deaminase comprises an E25M, E25D, E25A, E25R, E25V, E25S, or E25Y mutation in TadA reference sequence, or a corresponding mutation in another adenosine deaminase (e.g., ecTadA).

[0422] In some embodiments, the adenosine deaminase comprises an R26X mutation in TadA reference sequence, or a corresponding mutation in another adenosine deaminase, where X indicates any amino acid other than the corresponding amino acid in the wild-type adenosine deaminase. In some embodiments, the adenosine deaminase comprises R26G, R26N, R26Q, R26C, R26L, or R26K mutation in TadA reference sequence, or a corresponding mutation in another adenosine deaminase (e.g., ecTadA).

[0423] In some embodiments, the adenosine deaminase comprises an R107X mutation in TadA reference sequence, or a corresponding mutation in another adenosine deaminase, where X indicates any amino acid other than the corresponding amino acid in the wild-type adenosine deaminase. In some embodiments, the adenosine deaminase comprises an R107P, R107K, R107A, R107N, R107W, R107H, or R107S mutation in TadA reference sequence, or a corresponding mutation in another adenosine deaminase (e.g., ecTadA).

[0424] In some embodiments, the adenosine deaminase comprises an A142X mutation in TadA reference sequence, or a corresponding mutation in another adenosine deaminase, where X indicates any amino acid other than the corresponding amino acid in the wild-type adenosine deaminase. In some embodiments, the adenosine deaminase comprises an A142N, A142D, A142G, mutation in TadA reference sequence, or a corresponding mutation in another adenosine deaminase (e.g., ecTadA).

[0425] In some embodiments, the adenosine deaminase comprises an A143X mutation in TadA reference sequence, or a corresponding mutation in another adenosine deaminase, where X indicates any amino acid other than the corresponding amino acid in the wild-type adenosine deaminase. In some embodiments, the adenosine deaminase comprises an A143D, A143G, A143E, A143L, A143W, A143M, A143S, A143Q, and/or A143R mutation in TadA reference sequence, or a corresponding mutation in another adenosine deaminase (e.g., ecTadA).

[0426] In some embodiments, the adenosine deaminase comprises one or more of a H36X, N37X, P48X, I49X, R51X, M70X, N72X, D77X, E134X, S146X, Q154X, K157X, and/or K161X mutation in TadA reference sequence, or one or more corresponding mutations in another adenosine deaminase, where the presence of X indicates any amino acid other than the corresponding amino acid in the wild-type adenosine deaminase. In some embodiments, the adenosine deaminase comprises one or more of H36L, N37T, N37S, P48T, P48L, 149V, R51H, R51L, M70L, N72S, D77G, E134G, S146R, S146C, Q154H, K157N, and/or K161T mutation in TadA reference sequence, or one or more corresponding mutations in another adenosine deaminase (e.g., ecTadA).

[0427] In some embodiments, the adenosine deaminase comprises an H36X mutation in TadA reference sequence, or a corresponding mutation in another adenosine deaminase, where X indicates any amino acid other than the corresponding amino acid in the wild-type adenosine deaminase. In some embodiments, the adenosine deaminase comprises an H36L mutation in TadA reference sequence, or a corresponding mutation in another adenosine deaminase.

[0428] In some embodiments, the adenosine deaminase comprises an N37X mutation in TadA reference sequence, or a corresponding mutation in another adenosine deaminase, where X indicates any amino acid other than the corresponding amino acid in the wild-type adenosine deaminase. In some embodiments, the adenosine deaminase comprises an N37T or N37S mutation in TadA reference sequence, or a corresponding mutation in another adenosine deaminase.

[0429] In some embodiments, the adenosine deaminase comprises an P48X mutation in TadA reference sequence, or a corresponding mutation in another adenosine deaminase, where X indicates any amino acid other than the corresponding amino acid in the wild-type adenosine deaminase. In some embodiments, the adenosine deaminase comprises an P48T or P48L mutation in TadA reference sequence, or a corresponding mutation in another adenosine deaminase.

[0430] In some embodiments, the adenosine deaminase comprises an R51X mutation in TadA reference sequence, or a corresponding mutation in another adenosine deaminase, where X indicates any amino acid other than the corresponding amino acid in the wild-type adenosine deaminase. In some embodiments, the adenosine deaminase comprises an R51H or R51L mutation in TadA reference sequence, or a corresponding mutation in another adenosine deaminase.

[0431] In some embodiments, the adenosine deaminase comprises an S146X mutation in TadA reference sequence, or a corresponding mutation in another adenosine deaminase, where X indicates any amino acid other than the corresponding amino acid in the wild-type adenosine deaminase. In some embodiments, the adenosine deaminase comprises an S146R or S146C mutation in TadA reference sequence, or a corresponding mutation in another adenosine deaminase.

[0432] In some embodiments, the adenosine deaminase comprises an K157X mutation in TadA reference sequence, or a corresponding mutation in another adenosine deaminase, where X indicates any amino acid other than the corresponding amino acid in the wild-type adenosine deaminase. In some embodiments, the adenosine deaminase comprises a K157N mutation in TadA reference sequence, or a corresponding mutation in another adenosine deaminase.

[0433] In some embodiments, the adenosine deaminase comprises an P48X mutation in TadA reference sequence, or a corresponding mutation in another adenosine deaminase, where X indicates any amino acid other than the corresponding amino acid in the wild-type adenosine deaminase. In some embodiments, the adenosine deaminase comprises a P48S, P48T, or P48A mutation in TadA reference sequence, or a corresponding mutation in another adenosine deaminase.

[0434] In some embodiments, the adenosine deaminase comprises an A142X mutation in TadA reference sequence, or a corresponding mutation in another adenosine deaminase, where X indicates any amino acid other than the corresponding amino acid in the wild-type adenosine deaminase. In some embodiments, the adenosine deaminase comprises a A142N mutation in TadA reference sequence, or a corresponding mutation in another adenosine deaminase.

[0435] In some embodiments, the adenosine deaminase comprises an W23X mutation in TadA reference sequence, or a corresponding mutation in another adenosine deaminase, where X indicates any amino acid other than the corresponding amino acid in the wild-type adenosine deaminase. In some embodiments, the adenosine deaminase comprises a W23R or W23L mutation in TadA reference sequence, or a corresponding mutation in another adenosine deaminase.

[0436] In some embodiments, the adenosine deaminase comprises an R152X mutation in TadA reference sequence, or a corresponding mutation in another adenosine deaminase, where X indicates any amino acid other than the corresponding amino acid in the wild-type adenosine deaminase. In some embodiments, the adenosine deaminase comprises a R152P or R52H mutation in TadA reference sequence, or a corresponding mutation in another adenosine deaminase.

[0437] In one embodiment, the adenosine deaminase may comprise the mutations H36L, R51L, L84F, A106V, D108N, H123Y, S146C, D147Y, E155V, I156F, and K157N. In some embodiments, the adenosine deaminase comprises the following combination of mutations relative to TadA reference sequence, where each mutation of a combination is separated by a “_” and each combination of mutations is between parentheses:

### (A106V_D108N),

### (R107C_D108N),

### (H8Y_D108N_N127S_D147Y_Q154H),

### (H8Y_D108N_N127S_D147Y_E155V),

### (D108N_D147Y_E155V),

### (H8Y_D108N_N127S),

### (H8Y_D108N_N127S_D147Y_Q154H),

### (A106V_D108N_D147Y_E155V),

### (D108Q_D147Y_E155V),

### (D108M_D147Y_E155V),

### (D108L_D147Y_E155V),

### (D108K_D147Y_E155V),

### (D108I_D147Y_E155V),

### (D108F_D147Y_E155V),

### (A106V_D108N_D147Y),

### (A106V_D108M_D147Y_E155V),

### (E59A_A106V_D108N_D147Y_E155V),

[0438] (E59A cat dead_A106V_D108N_D147Y_E155V),

### (L84F_A106V_D108N_H123Y_D147Y_E155V_I156Y),

### (L84F_A106V_D108N_H123Y_D147Y_E155V_I156F),

### (D103A_D104N),

### (G22P_D103A_D104N),

### (D103A_D104N_S138A),

### (R26G_L84F_A106V_R107H_D108N_H123Y_A142N_A143D_D147Y_E155V_I156F),

### (E25G_R26G_L84F_A106V_R107H_D108N_H123Y_A142N_A143D_D147Y_E155V_I156F),

### (E25D_R26G_L84F_A106V_R107K_D108N_H123Y_A142N_A143G_D147Y_E155V_I156F),

### (R26Q_L84F_A106V_D108N_H123Y_A142N_D147Y_E155V_I156F),

### (E25M_R26G_L84F_A106V_R107P_D108N_H123Y_A142N_A143D_D147Y_E155V_I156F),

### (R26C_L84F_A106V_R107H_D108N_H123Y_A142N_D147Y_E155V_I156F),

### (L84F_A106V_D108N_H123Y_A142N_A143L_D147Y_E155V_I156F),

### (R26G_L84F_A106V_D108N_H123Y_A142N_D147Y_E155V_I156F),

### (E25A_R26G_L84F_A106V_R107N_D108N_H123Y_A142N_A143E_D147Y_E155V_I156F),

### (R26G_L84F_A106V_R107H_D108N_H123Y_A142N_A143D_D147Y_E155V_I156F),

### (A106V_D108N_A142N_D147Y_E155V),

### (R26G_A106V_D108N_A142N_D147Y_E155V),

### (E25D_R26G_A106V_R107K_D108N_A142N_A143G_D147Y_E155V),

### (R26G_A106V_D108N_R107H_A142N_A143D_D147Y_E155V),

### (E25D_R26G_A106V_D108N_A142N_D147Y_E155V),

### (A106V_R107K_D108N_A142N_D147Y_E155V),

### (A106V_D108N_A142N_A143G_D147Y_E155V),

### (A106V_D108N_A142N_A143L_D147Y_E155V),

### (H36L_R51L_L84F_A106V_D108N_H123Y_S146C_D147Y_E155V_I156F_K157N),

### (N37T_P48T_M70L_L84F_A106V_D108N_H123Y_D147Y_I49V_E155V_I156F),

### (N37S_L84F_A106V_D108N_H123Y_D147Y_E155V_I156F_K161T),

### (H36L_L84F_A106V_D108N_H123Y_D147Y_Q154H_E155V_I156F),

### (N72S_L84F_A106V_D108N_H123Y_S146R_D147Y_E155V_I156F),

### (H36L_P48L_L84F_A106V_D108N_H123Y_E134G_D147Y_E155V_I156F),

### (H36L_L84F_A106V_D108N_H123Y_D147Y_E155V_I156F_K157N)

### (H36L_L84F_A106V_D108N_H123Y_S146C_D147Y_E155V_I156F),

### (L84F_A106V_D108N_H123Y_S146R_D147Y_E155V_I156F_K161T),

### (N37S_R51H_D77G_L84F_A106V_D108N_H123Y_D147Y_E155V_I156F),

### (R51L_L84F_A106V_D108N_H123Y_D147Y_E155V_I156F_K157N),

### (D24G_Q71R_L84F_H96L_A106V_D108N_H123Y_D147Y_E155V_I156F_K160E),

### (H36L_G67V_L84F_A106V_D108N_H123Y_S146T_D147Y_E155V_I156F),

### (Q71L_L84F_A106V_D108N_H123Y_L137M_A143E_D147Y_E155V_I156F),

### (E25G_L84F_A106V_D108N_H123Y_D147Y_E155V_I156F_Q159L),

### (L84F_A91T_F1041_A106V_D108N_H123Y_D147Y_E155V_I156F),

### (N72D_L84F_A106V_D108N_H123Y_G125A_D147Y_E155V_I156F),

### (P48S_L84F_S97C_A106V_D108N_H123Y_D147Y_E155V_I156F),

### (W23G_L84F_A106V_D108N_H123Y_D147Y_E155V_I156F),

### (D24G_P48L_Q71R_L84F_A106V_D108N_H123Y_D147Y_E155V_I156F_Q159L),

### (L84F_A106V_D108N_H123Y_A142N_D147Y_E155V_I156F),

### (H36L_R51L_L84F_A106V_D108N_H123Y_A142N_S146C_D147Y_E155V_I156F_K157N),

### (N37S_L84F_A106V_D108N_H123Y_A142N_D147Y_E155V_I156F_K161T),

### (L84F_A106V_D108N_D147Y_E155V_I156F),

### (R51L_L84F_A106V_D108N_H123Y_S146C_D147Y_E155V_I156F_K157N_K161T),

### (L84F_A106V_D108N_H123Y_S146C_D147Y_E155V_I156F_K161T),

### (L84F_A106V_D108N_H123Y_S146C_D147Y_E155V_I156F_K157N_K160E_K161T),

### (L84F_A106V_D108N_H123Y_S146C_D147Y_E155V_I156F_K157N_K160E),

### (R74Q_L84F_A106V_D108N_H123Y_D147Y_E155V_I156F),

### (R74A_L84F_A106V_D108N_H123Y_D147Y_E155V_I156F),

### (L84F_A106V_D108N_H123Y_D147Y_E155V_I156F),

### (R74Q_L84F_A106V_D108N_H123Y_D147Y_E155V_I156F),

### (L84F_R98Q_A106V_D108N_H123Y_D147Y_E155V_I156F),

### (L84F_A106V_D108N_H123Y_R129Q_D147Y_E155V_I156F),

### (P48S_L84F_A106V_D108N_H123Y_A142N_D147Y_E155V_I156F),

### (P48S_A142N),

### (P48T_I49V_L84F_A106V_D108N_H123Y_A142N_D147Y_E155V_I156F_L157N),

### (P48T_I49V_A142N),

### (H36L_P48S_R51L_L84F_A106V_D108N_H123Y_S146C_D147Y_E155V_I156F_K157N),

### (H36L_P48S_R51L_L84F_A106V_D108N_H123Y_S146C_A142N_D147Y_E155V_I156F

### (H36L_P48T_I49V_R51L_L84F_A106V_D108N_H123Y_S146C_D147Y_E155V_I156F_K157N),

### (H36L_P48T_I49V_R51L_L84F_A106V_D108N_H123Y_A142N_S146C_D147Y_E155V_I156F_K157N),

### (H36L_P48A_R51L_L84F_A106V_D108N_H123Y_S146C_D147Y_E155V_I156F_K157N),

### (H36L_P48A_R51L_L84F_A106V_D108N_H123Y_A142N_S146C_D147Y_E155V_I156F_K157N),

### (H36L_P48A_R51L_L84F_A106V_D108N_H123Y_S146C_A142N_D147Y_E155V_I156F_K157N),

### (W23L_H36L_P48A_R51L_L84F_A106V_D108N_H123Y_S146C_D147Y_E155V_I156F_K157N),

### (W23R_H36L_P48A_R51L_L84F_A106V_D108N_H123Y_S146C_D147Y_E155V_I156F_K157N),

### (W23L_H36L_P48A_R51L_L84F_A106V_D108N_H123Y_S146R_D147Y_E155V_I156F_K161T),

### (H36L_P48A_R51L_L84F_A106V_D108N_H123Y_S146C_D147Y_R152H_E155V_I156F_K157N),

### (H36L_P48A_R51L_L84F_A106V_D108N_H123Y_S146C_D147Y_R152P_E155V_I156F_K157N),

### (W23L_H36L_P48A_R51L_L84F_A106V_D108N_H123Y_S146C_D147Y_R152P_E155V_I156F_K157N),

### (W23L_H36L_P48A_R51L_L84F_A106V_D108N_H123Y_A142A_S146C_D147Y_E155V_I156F_K157N),

### (W23L_H36L_P48A_R51L_L84F_A106V_D108N_H123Y_A142A_S146C_D147Y_R152P_E155V_I156F_K157N),

### (W23L_H36L_P48A_R51L_L84F_A106V_D108N_H123Y_S146R_D147Y_E155V_I156F_K161T),

### (W23R_H36L_P48A_R51L_L84F_A106V_D108N_H123Y_S146C_D147Y_R152P_E155V_I156F_K157N),

### (H36L_P48A_R51L_L84F_A106V_D108N_H123Y_A142N_S146C_D147Y_R152P_E155V_I156F_K157N).

[0439] In some embodiments, the TadA deaminase is TadA variant. In some embodiments, the TadA variant is TadA*7.10. In particular embodiments, the fusion proteins comprise a single TadA*7.10 domain (e.g., provided as a monomer). In other embodiments, the fusion protein comprises TadA*7.10 and TadA(wt), which are capable of forming heterodimers. In one embodiment, a fusion protein of the invention comprises a wild-type TadA linked to TadA*7.10, which is linked to Cas9 nickase.

[0440] In some embodiments, TadA*7.10 comprises at least one alteration. In some embodiments, the adenosine deaminase comprises an alteration in the following sequence:

TadA*7.10
(SEQ ID NO: 8)
MSEVEFSHEYWMRHALTLAKRARDEREVPVGAVLVLNNRVIGEGWNRAIG
LHDPTAHAEIMALRQGGLVMQNYRLIDATLYVTFEPCVMCAGAMIHSRIG
RVVFGVRNAKTGAAGSLMDVLHYPGMNHRVEITEGILADECAALLCYFFR
MPRQVFNAQKKAQSSTD

[0441] In some embodiments, TadA*7.10 comprises an alteration at amino acid 82 and/or 166. In particular embodiments, TadA*7.10 comprises one or more of the following alterations: Y147T, Y147R, Q154S, Y123H, V82S, T166R, and/or Q154R. In other embodiments, a variant of TadA*7.10 comprises a combination of alterations selected from the group of: Y147T+Q154R; Y147T+Q154S; Y147R+Q154S; V82S+Q154S; V82S+Y147R; V82S+Q154R; V82S+Y123H; I76Y+V82S; V82S+Y123H+Y147T; V82S+Y123H+Y147R; V82S+Y123H+Q154R; Y147R+Q154R+Y123H; Y147R+Q154R+I76Y; Y147R+Q154R+T166R; Y123H+Y147R+Q154R+I76Y; V82S+Y123H+Y147R+Q154R; and I76Y+V82S+Y123H+Y147R+Q154R.

[0442] In some embodiments, an adenosine deaminase variant (e.g., TadA*8) comprises a deletion. In some embodiments, an adenosine deaminase variant comprises a deletion of the C terminus. In particular embodiments, an adenosine deaminase variant comprises a deletion of the C terminus beginning at residue 149, 150, 151, 152, 153, 154, 155, 156, and 157, relative to TadA*7.10, the TadA reference sequence, or a corresponding mutation in another TadA.

[0443] In other embodiments, an adenosine deaminase variant (e.g., TadA*8) is a monomer comprising one or more of the following alterations: Y147T, Y147R, Q154S, Y123H, V82S, T166R, and/or Q154R, relative to TadA*7.10, the TadA reference sequence, or a corresponding mutation in another TadA. In other embodiments, the adenosine deaminase variant (TadA*8) is a monomer comprising a combination of alterations selected from the group of: Y147T+Q154R; Y147T+Q154S; Y147R+Q154S; V82S+Q154S; V82S+Y147R; V82S+Q154R; V82S+Y123H; I76Y+V82S; V82S+Y123H+Y147T; V82S+Y123H+Y147R; V82S+Y123H+Q154R; Y147R+Q154R+Y123H; Y147R+Q154R+I76Y; Y147R+Q154R+T166R; Y123H+Y147R+Q154R+I76Y; V82S+Y123H+Y147R+Q154R; and I76Y+V82S+Y123H+Y147R+Q154R, relative to TadA*7.10, the TadA reference sequence, or a corresponding mutation in another TadA.

[0444] In other embodiments, the adenosine deaminase variant is a homodimer comprising two adenosine deaminase domains (e.g., TadA*8) each having one or more of the following alterations Y147T, Y147R, Q154S, Y123H, V82S, T166R, and/or Q154R, relative to TadA*7.10, the TadA reference sequence, or a corresponding mutation in another TadA. In other embodiments, the adenosine deaminase variant is a homodimer comprising two adenosine deaminase domains (e.g., TadA*8) each having a combination of alterations selected from the group of: Y147T+Q154R; Y147T+Q154S; Y147R+Q154S; V82S+Q154S; V82S+Y147R; V82S+Q154R; V82S+Y123H; I76Y+V82S; V82S+Y123H+Y147T; V82S+Y123H+Y147R; V82S+Y123H+Q154R; Y147R+Q154R+Y123H; Y147R+Q154R+I76Y; Y147R+Q154R+T166R; Y123H+Y147R+Q154R+I76Y; V82S+Y123H+Y147R+Q154R; and I76Y+V82S+Y123H+Y147R+Q154R, relative to TadA*7.10, the TadA reference sequence, or a corresponding mutation in another TadA.

[0445] In other embodiments, the adenosine deaminase variant is a heterodimer of a wild-type adenosine deaminase domain and an adenosine deaminase variant domain (e.g., TadA*8) comprising one or more of the following alterations Y147T, Y147R, Q154S, Y123H, V82S, T166R, and/or Q154R, relative to TadA*7.10, the TadA reference sequence, or a corresponding mutation in another TadA. In other embodiments, the adenosine deaminase variant is a heterodimer of a wild-type adenosine deaminase domain and an adenosine deaminase variant domain (e.g., TadA*8) comprising a combination of alterations selected from the group of: Y147T+Q154R; Y147T+Q154S; Y147R+Q154S; V82S+Q154S; V82S+Y147R; V82S+Q154R; V82S+Y123H; I76Y+V82S; V82S+Y123H+Y147T; V82S+Y123H+Y147R; V82S+Y123H+Q154R; Y147R+Q154R+Y123H; Y147R+Q154R+I76Y; Y147R+Q154R+T166R; Y123H+Y147R+Q154R+I76Y; V82S+Y123H+Y147R+Q154R; and I76Y+V82S+Y123H+Y147R+Q154R, relative to TadA*7.10, the TadA reference sequence, or a corresponding mutation in another TadA.

[0446] In other embodiments, the adenosine deaminase variant is a heterodimer of a TadA*7.10 domain and an adenosine deaminase variant domain (e.g., TadA*8) comprising one or more of the following alterations Y147T, Y147R, Q154S, Y123H, V82S, T166R, and/or Q154R, relative to TadA*7.10, the TadA reference sequence, or a corresponding mutation in another TadA. In other embodiments, the adenosine deaminase variant is a heterodimer of a TadA*7.10 domain and an adenosine deaminase variant domain (e.g., TadA*8) comprising a combination of alterations selected from the group of: Y147T+Q154R; Y147T+Q154S; Y147R+Q154S; V82S+Q154S; V82S+Y147R; V82S+Q154R; V82S+Y123H; I76Y+V82S; V82S+Y123H+Y147T; V82S+Y123H+Y147R; V82S+Y123H+Q154R; Y147R+Q154R+Y123H; Y147R+Q154R+I76Y; Y147R+Q154R+T166R; Y123H+Y147R+Q154R+I76Y; V82S+Y123H+Y147R+Q154R; and I76Y+V82S+Y123H+Y147R+Q154R, relative to TadA*7.10, the TadA reference sequence, or a corresponding mutation in another TadA.

[0447] In particular embodiments, an adenosine deaminase heterodimer comprises a TadA*8 domain and an adenosine deaminase domain selected from Staphylococcus aureus (S. aureus) TadA, Bacillus subtilis (B. subtilis) TadA, Salmonella typhimurium (S. typhimurium) TadA, Shewanella putrefaciens (S. putrefaciens) TadA, Haemophilus influenzae F3031 (H. influenzae) TadA, Caulobacter crescentus (C. crescentus) TadA, Geobacter sulfurreducens (G. sulfurreducens) TadA, or TadA*7.10.

[0448] In some embodiments, an adenosine deaminase is a TadA*8. In one embodiment, an adenosine deaminase is a TadA*8 that comprises or consists essentially of the following sequence or a fragment thereof having adenosine deaminase activity:

(SEQ ID NO: 12)
MSEVEFSHEYWMRHALTLAKRARDEREVPVGAVLVLNNRVIGEGWNRAIG
LHDPTAHAEIMALRQGGLVMQNYRLIDATLYVTFEPCVMCAGAMIHSRIG
RWFGVRNAKTGAAGSLMDVLHYPGMNHRVEITEGILADECAALLCTFFRM
PRQVFNAQKKAQSSTD

[0449] In some embodiments, the TadA*8 is truncated. In some embodiments, the truncated TadA*8 is missing 1, 2, 3, 4, 5, 6, 7, 8, 9, 10, 11, 12, 13, 14, 15, 6, 17, 18, 19, or 20 N-terminal amino acid residues relative to the full length TadA*8. In some embodiments, the truncated TadA*8 is missing 1, 2, 3, 4, 5, 6, 7, 8, 9, 10, 11, 12, 13, 14, 15, 6, 17, 18, 19, or 20 C-terminal amino acid residues relative to the full length TadA*8. In some embodiments the adenosine deaminase variant is a full-length TadA*8.

[0450] In some embodiments the TadA*8 is TadA*8.1, TadA*8.2, TadA*8.3, TadA*8.4, TadA*8.5, TadA*8.6, TadA*8.7, TadA*8.8, TadA*8.9, TadA*8.10, TadA*8.11, TadA*8.12, TadA*8.13, TadA*8.14, TadA*8.15, TadA*8.16, TadA*8.17, TadA*8.18, TadA*8.19, TadA*8.20, TadA*8.21, TadA*8.22, TadA*8.23, or TadA*8.24.

[0451] In other embodiments, a base editor of the disclosure comprising an adenosine deaminase variant (e.g., TadA*8) monomer comprising one or more of the following alterations: R26C, V88A, A109S, T111R, D119N, H122N, Y147D, F149Y, T166I and/or D167N, relative to TadA*7.10, the TadA reference sequence, or a corresponding mutation in another TadA. In other embodiments, the adenosine deaminase variant (TadA*8) monomer comprises a combination of alterations selected from the group of: R26C+A109S+T111R+D119N+H122N+Y147D+F149Y+T166I+D167N; V88A+A109S+T111R+D119N+H122N+F149Y+T166I+D167N; R26C+A109S+T111R+D119N+H122N+F149Y+T166I+D167N; V88A+T111R+D119N+F149Y; and A109S+T111R+D119N+H122N+Y147D+F149Y+T166I+D167N, relative to TadA*7.10, the TadA reference sequence, or a corresponding mutation in another TadA.

[0452] In other embodiments, a base editor comprises a heterodimer of a wild-type adenosine deaminase domain and an adenosine deaminase variant domain (e.g., TadA*8) comprising one or more of the following alterations R26C, V88A, A109S, T111R, D119N, H122N, Y147D, F149Y, T166I and/or D167N, relative to TadA*7.10, the TadA reference sequence, or a corresponding mutation in another TadA. In other embodiments, the base editor comprises a heterodimer of a wild-type adenosine deaminase domain and an adenosine deaminase variant domain (e.g., TadA*8) comprising a combination of alterations selected from the group of: R26C+A109S+T111R+D119N+H122N+Y147D+F149Y+T166I+D167N; V88A+A109S+T111R+D119N+H122N+F149Y+T166I+D167N; R26C+A109S+T111R+D119N+H122N+F149Y+T166I+D167N; V88A+T111R+D119N+F149Y; and A109S+T111R+D119N+H122N+Y147D+F149Y+T166I+D167N, relative to TadA*7.10, the TadA reference sequence, or a corresponding mutation in another TadA.

[0453] In other embodiments, a base editor comprises a heterodimer of a TadA*7.10 domain and an adenosine deaminase variant domain (e.g., TadA*8) comprising one or more of the following alterations R26C, V88A, A109S, T111R, D119N, H122N, Y147D, F149Y, T166I and/or D167N, relative to TadA*7.10, the TadA reference sequence, or a corresponding mutation in another TadA. In other embodiments, the base editor comprises a heterodimer of a TadA*7.10 domain and an adenosine deaminase variant domain (e.g., TadA*8) comprising a combination of alterations selected from the group of: R26C+A109S+T111R+D119N+H122N+Y147D+F149Y+T166I+D167N; V88A+A109S+T111R+D119N+H122N+F149Y+T166I+D167N; R26C+A109S+T111R+D119N+H122N+F149Y+T166I+D167N; V88A+T111R+D119N+F149Y; and A109S+T111R+D119N+H122N+Y147D+F149Y+T166I+D167N, relative to TadA*7.10, the TadA reference sequence, or a corresponding mutation in another TadA.

[0454] In some embodiments, the TadA*8 is a variant as shown in Table 5. Table 5 shows certain amino acid position numbers in the TadA amino acid sequence and the amino acids present in those positions in the TadA-7.10 adenosine deaminase. Table 5 also shows amino acid changes in TadA variants relative to TadA-7.10 following phage-assisted non-continuous evolution (PANCE) and phage-assisted continuous evolution (PACE), as described in M. Richter et al., 2020, Nature Biotechnology, doi.org/10.1038/s41587-020-0453-z, the entire contents of which are incorporated by reference herein. In some embodiments, the TadA*8 is TadA*8a, TadA*8b, TadA*8c, TadA*8d, or TadA*8e. In some embodiments, the TadA*8 is TadA*8e.

TABLE 5
Select TadA*8 Variants

| | | TadA amino acid number | | | | | | | | | |
|---|---|---|---|---|---|---|---|---|---|---|---|
| | TadA | 26 | 88 | 109 | 111 | 119 | 122 | 147 | 149 | 166 | 167 |
| | TadA-7.10 | R | V | A | T | D | H | Y | F | T | D |
| PANCE 1 | | | | | R | | | | | | |
| PANCE 2 | | | | S/T | R | | | | | | |
| | TadA-8a | C | | S | R | N | N | D | Y | I | N |
| | TadA-8b | | A | S | R | N | N | | Y | I | N |
| PACE | TadA-8c | C | | S | R | N | N | | Y | I | N |
| | TadA-8d | | A | | R | N | | | Y | | |
| | TadA-8e | | | S | R | N | N | D | Y | I | N |

[0455] In one embodiment, a fusion protein of the invention comprises a wild-type TadA is linked to an adenosine deaminase variant described herein (e.g., TadA*8), which is linked to Cas9 nickase. In particular embodiments, the fusion proteins comprise a single TadA*8 domain (e.g., provided as a monomer). In other embodiments, the fusion protein comprises TadA*8 and TadA(wt), which are capable of forming heterodimers.

[0456] In some embodiments, the adenosine deaminase comprises an amino acid sequence that is at least 60%, at least 65%, at least 70%, at least 75%, at least 80%, at least 85%, at least 90%, at least 95%, at least 96%, at least 97%, at least 98%, at least 99%, or at least 99.5% identical to any one of the amino acid sequences set forth in any of the adenosine deaminases provided herein. It should be appreciated that adenosine deaminases provided herein may include one or more mutations (e.g., any of the mutations provided herein). The disclosure provides any deaminase domains with a certain percent identity plus any of the mutations or combinations thereof described herein. In some embodiments, the adenosine deaminase comprises an amino acid sequence that has 1, 2, 3, 4, 5, 6, 7, 8, 9, 10, 11, 12, 13, 14, 15, 16, 17, 18, 19, 20, 21, 22, 21, 24, 25, 26, 27, 28, 29, 30, 31, 32, 33, 34, 35, 36, 37, 38, 39, 40, 41, 42, 43, 44, 45, 46, 47, 48, 49, 50, or more mutations compared to a reference sequence, or any of the adenosine deaminases provided herein. In some embodiments, the adenosine deaminase comprises an amino acid sequence that has at least 5, at least 10, at least 15, at least 20, at least 25, at least 30, at least 35, at least 40, at least 45, at least 50, at least 60, at least 70, at least 80, at least 90, at least 100, at least 110, at least 120, at least 130, at least 140, at least 150, at least 160, or at least 170 identical contiguous amino acid residues as compared to any one of the amino acid sequences known in the art or described herein.

[0457] In particular embodiments, a TadA*8 comprises one or more mutations at any of the following positions shown in bold. In other embodiments, a TadA*8 comprises one or more mutations at any of the positions shown with underlining:

| (SEQ ID NO: 8) | |
|---|---|
| | MSEVEFSHEY WMRHALTLAK RARDEREVPV GAVLVLNNRV |
| | IGEGWNRAIG ⁵⁰ LHDPTAHAEI MALRQGGLVM QNYRLIDATL |
| | YVTFEPCVMC AGAMIHSRIG ¹⁰⁰ RVVFGVRNAK TGAAGSLMDV |
| | LHYPGMNHRV EITEGILADE CAALLCYFFR ¹⁵⁰ MPRQVFAAQK |
| | KAQSSTD |

[0458] For example, the TadA*8 comprises alterations at amino acid position 82 and/or 166 (e.g., V82S, T166R) alone or in combination with any one or more of the following Y147T, Y147R, Q154S, Y123H, and/or Q154R, relative to TadA*7.10, the TadA reference sequence, or a corresponding mutation in another TadA. In particular embodiments, a combination of alterations is selected from the group of: Y147T+Q154R; Y147T+Q154S; Y147R+Q154S; V82S+Q154S; V82S+Y147R; V82S+Q154R; V82S+Y123H; I76Y+V82S; V82S+Y123H+Y147T; V82S+Y123H+Y147R; V82S+Y123H+Q154R; Y147R+Q154R+Y123H; Y147R+Q154R+I76Y; Y147R+Q154R+T166R; Y123H+Y147R+Q154R+I76Y; V82S+Y123H+Y147R+Q154R; and I76Y+V82S+Y123H+Y147R+Q154R, relative to TadA*7.10, the TadA reference sequence, or a corresponding mutation in another TadA.

[0459] In some embodiments, the TadA*8 is truncated. In some embodiments, the truncated TadA*8 is missing 1, 2, 3, 4, 5, 6, 7, 8, 9, 10, 11, 12, 13, 14, 15, 6, 17, 18, 19, or 20 N-terminal amino acid residues relative to the full length TadA*8. In some embodiments, the truncated TadA*8 is missing 1, 2, 3, 4, 5, 6, 7, 8, 9, 10, 11, 12, 13, 14, 15, 6, 17, 18, 19, or 20 C-terminal amino acid residues relative to the full length TadA*8. In some embodiments the adenosine deaminase variant is a full-length TadA*8.

[0460] In one embodiment, a fusion protein of the invention comprises a wild-type TadA is linked to an adenosine deaminase variant described herein (e.g., TadA*8), which is linked to Cas9 nickase. In particular embodiments, the fusion proteins comprise a single TadA*8 domain (e.g., provided as a monomer). In other embodiments, the base editor comprises TadA*8 and TadA(wt), which are capable of forming heterodimers.

[0461] In particular embodiments, the fusion proteins comprise a single (e.g., provided as a monomer) TadA*8. In some embodiments, the TadA*8 is linked to a Cas9 nickase. In some embodiments, the fusion proteins of the invention comprise as a heterodimer of a wild-type TadA (TadA(wt)) linked to a TadA*8. In other embodiments, the fusion proteins of the invention comprise as a heterodimer of a TadA*7.10 linked to a TadA*8. In some embodiments, the base editor is ABE8 comprising a TadA*8 variant monomer. In some embodiments, the base editor is ABE8 comprising a heterodimer of a TadA*8 and a TadA(wt). In some embodiments, the base editor is ABE8 comprising a heterodimer of a TadA*8 and TadA*7.10. In some embodiments, the base editor is ABE8 comprising a heterodimer of a TadA*8. In some embodiments, the TadA*8 is selected from Table 11, 13 or 14. In some embodiments, the ABE8 is selected from Table 13, 14 or 16.

[0462] In some embodiments, the adenosine deaminase is a TadA*9 variant. In some embodiments, the adenosine deaminase is a TadA*9 variant selected from the variants described below and with reference to the following sequence (termed TadA*7.10):

(SEQ ID NO: 8)
MSEVEFSHEY WMRHALTLAK RARDEREVPV GAVLVLNNRV
IGEGWNRAIG LHDPTAHAEI MALRQGGLVM QNYRLIDATL
YVTFEPCVMC AGAMIHSRIG RVVFGVRNAK TGAAGSLMDV
LHYPGMNHRV EITEGILADE CAALLCYFFR MPRQVFNAQK
KAQSSTD.

[0463] In some embodiments, an adenosine deaminase comprises one or more of the following alterations: R21N, R23H, E25F, N38G, L51W, P54C, M70V, Q71M, N72K, Y73S, V82T, M94V, P124W, T133K, D139L, D139M, C146R, and A158K. The one or more alternations are shown in the sequence above in underlining and bold font.

[0464] In some embodiments, an adenosine deaminase comprises one or more of the following combinations of alterations: V82S+Q154R+Y147R; V82S+Q154R+Y123H; V82S+Q154R+Y147R+Y123H; Q154R+Y147R+Y123H+I76Y+V82S; V82S+I76Y; V82S+Y147R; V82S+Y147R+Y123H; V82S+Q154R+Y123H; Q154R+Y147R+Y123H+I76Y; V82S+Y147R; V82S+Y147R+Y123H; V82S+Q154R+Y123H; V82S+Q154R+Y147R; V82S+Q154R+Y147R; Q154R+Y147R+Y123H+I76Y; Q154R+Y147R+Y123H+I76Y+V82S; I76Y_V82S_Y123H_Y147R_Q154R; Y147R+Q154R+H123H; and V82S+Q154R.

[0465] In some embodiments, an adenosine deaminase comprises one or more of the following combinations of alterations: E25F+V82S+Y123H, T133K+Y147R+Q154R; E25F+V82S+Y123H+Y147R+Q154R; L51W+V82S+Y123H+C146R+Y147R+Q154R; Y73S+V82S+Y123H+Y147R+Q154R; P54C+V82S+Y123H+Y147R+Q154R; N38G+V82T+Y123H+Y147R+Q154R; N72K+V82S+Y123H+D139L+Y147R+Q154R; E25F+V82S+Y123H+D139M+Y147R+Q154R; Q71M+V82S+Y123H+Y147R+Q154R; E25F+V82S+Y123H+T133K+Y147R+Q154R; E25F+V82S+Y123H+Y147R+Q154R; V82S+Y123H+P124W+Y147R+Q154R; L51W+V82S+Y123H+C146R+Y147R+Q154R; P54C+V82S+Y123H+Y147R+Q154R; Y73S+V82S+Y123H+Y147R+Q154R; N38G+V82T+Y123H+Y147R+Q154R; R23H+V82S+Y123H+Y147R+Q154R; R21N+V82S+Y123H+Y147R+Q154R; V82S+Y123H+Y147R+Q154R+A158K; N72K+V82S+Y123H+D139L+Y147R+Q154R; E25F+V82S+Y123H+D139M+Y147R+Q154R; and M70V+V82S+M94V+Y123H+Y147R+Q154R

[0466] In some embodiments, an adenosine deaminase comprises one or more of the following combinations of alterations: Q71M+V82S+Y123H+Y147R+Q154R; E25F+I76Y+V82S+Y123H+Y147R+Q154R; I76Y+V82T+Y123H+Y147R+Q154R; N38G+I76Y+V82S+Y123H+Y147R+Q154R; R23H+I76Y+V82S+Y123H+Y147R+Q154R; P54C+I76Y+V82S+Y123H+Y147R+Q154R; R21N+I76Y+V82S+Y123H+Y147R+Q154R; I76Y+V82S+Y123H+D139M+Y147R+Q154R; Y73S+I76Y+V82S+Y123H+Y147R+Q154R; E25F+I76Y+V82S+Y123H+Y147R+Q154R; I76Y+V82T+Y123H+Y147R+Q154R; N38G+I76Y+V82S+Y123H+Y147R+Q154R; R23H+I76Y+V82S+Y123H+Y147R+Q154R; P54C+I76Y+V82S+Y123H+Y147R+Q154R; R21N+I76Y+V82S+Y123H+Y147R+Q154R; I76Y+V82S+Y123H+D139M+Y147R+Q154R; Y73S+I76Y+V82S+Y123H+Y147R+Q154R; and V82S+Q154R; N72K_V82S+Y123H+Y147R+Q154R; Q71M_V82S+Y123H+Y147R+Q154R; V82S+Y123H+T133K+Y147R+Q154R; V82S+Y123H+T133K+Y147R+Q154R+A158K; M70V+Q71M+N72K+V82S+Y123H+Y147R+Q154R; N72K_V82S+Y123H+Y147R+Q154R; Q71M_V82S+Y123H+Y147R+Q154R; M70V+V82S+M94V+Y123H+Y147R+Q154R; V82S+Y123H+T133K+Y147R+Q154R; V82S+Y123H+T133K+Y147R+Q154R+A158K; and M70V+Q71M+N72K+V82S+Y123H+Y147R+Q154R. In some embodiments, the adenosine deaminase is expressed as a monomer. In other embodiments, the adenosine deaminase is expressed as a heterodimer. In some embodiments, the deaminase or other polypeptide sequence lacks a methionine, for example when included as a component of a fusion protein. This can alter the numbering of positions. However, the skilled person will understand that such corresponding mutations refer to the same mutation, e.g., Y73S and Y72S and D139M and D138M.

[0467] In some embodiments, the TadA*9 variant comprises the alterations described in Table 17 as described herein. In some embodiments, the TadA*9 variant is a monomer. In some embodiments, the TadA*9 variant is a heterodimer with a wild-type TadA adenosine deaminase. In some embodiments, the TadA*9 variant is a heterodimer with another TadA variant (e.g., TadA*8, TadA*9). Additional details of TadA*9 adenosine deaminases are described in International PCT Application No. PCT/2020/049975, which is incorporated herein by reference for its entirety.

[0468] Any of the mutations provided herein and any additional mutations (e.g., based on the ecTadA amino acid sequence) can be introduced into any other adenosine deaminases. Any of the mutations provided herein can be made individually or in any combination in TadA reference sequence or another adenosine deaminase (e.g., ecTadA).

[0469] Details of A to G nucleobase editing proteins are described in International PCT Application No. PCT/2017/045381 (WO2018/027078) and Gaudelli, N. M., et al., “Programmable base editing of A•T to G•C in genomic DNA without DNA cleavage” Nature, 551, 464-471 (2017), the entire contents of which are hereby incorporated by reference.

### C to T Editing

[0470] In some embodiments, a base editor disclosed herein comprises a fusion protein comprising cytidine deaminase capable of deaminating a target cytidine (C) base of a polynucleotide to produce uridine (U), which has the base pairing properties of thymine. In some embodiments, for example where the polynucleotide is double-stranded (e.g., DNA), the uridine base can then be substituted with a thymidine base (e.g., by cellular repair machinery) to give rise to a C:G to a T:A transition. In other embodiments, deamination of a C to U in a nucleic acid by a base editor cannot be accompanied by substitution of the U to a T.

[0471] The deamination of a target C in a polynucleotide to give rise to a U is a non-limiting example of a type of base editing that can be executed by a base editor described herein. In another example, a base editor comprising a cytidine deaminase domain can mediate conversion of a cytosine (C) base to a guanine (G) base. For example, a U of a polynucleotide produced by deamination of a cytidine by a cytidine deaminase domain of a base editor can be excised from the polynucleotide by a base excision repair mechanism (e.g., by a uracil DNA glycosylase (UDG) domain), producing an abasic site. The nucleobase opposite the abasic site can then be substituted (e.g., by base repair machinery) with another base, such as a C, by for example a translesion polymerase. Although it is typical for a nucleobase opposite an abasic site to be replaced with a C, other substitutions (e.g., A, G or T) can also occur.

[0472] Accordingly, in some embodiments a base editor described herein comprises a deamination domain (e.g., cytidine deaminase domain) capable of deaminating a target C to a U in a polynucleotide. Further, as described below, the base editor can comprise additional domains which facilitate conversion of the U resulting from deamination to, in some embodiments, a T or a G. For example, a base editor comprising a cytidine deaminase domain can further comprise a uracil glycosylase inhibitor (UGI) domain to mediate substitution of a U by a T, completing a C-to-T base editing event. In another example, a base editor can incorporate a translesion polymerase to improve the efficiency of C-to-G base editing, since a translesion polymerase can facilitate incorporation of a C opposite an abasic site (i.e., resulting in incorporation of a G at the abasic site, completing the C-to-G base editing event).

[0473] A base editor comprising a cytidine deaminase as a domain can deaminate a target C in any polynucleotide, including DNA, RNA and DNA-RNA hybrids. Typically, a cytidine deaminase catalyzes a C nucleobase that is positioned in the context of a single-stranded portion of a polynucleotide. In some embodiments, the entire polynucleotide comprising a target C can be single-stranded. For example, a cytidine deaminase incorporated into the base editor can deaminate a target C in a single-stranded RNA polynucleotide. In other embodiments, a base editor comprising a cytidine deaminase domain can act on a double-stranded polynucleotide, but the target C can be positioned in a portion of the polynucleotide which at the time of the deamination reaction is in a single-stranded state. For example, in embodiments where the NAGPB domain comprises a Cas9 domain, several nucleotides can be left unpaired during formation of the Cas9-gRNA-target DNA complex, resulting in formation of a Cas9 “R-loop complex”. These unpaired nucleotides can form a bubble of single-stranded DNA that can serve as a substrate for a single-strand specific nucleotide deaminase enzyme (e.g., cytidine deaminase).

[0474] In some embodiments, a cytidine deaminase of a base editor can comprise all or a portion of an apolipoprotein B mRNA editing complex (APOBEC) family deaminase. APOBEC is a family of evolutionarily conserved cytidine deaminases. Members of this family are C-to-U editing enzymes. The N-terminal domain of APOBEC like proteins is the catalytic domain, while the C-terminal domain is a pseudocatalytic domain. More specifically, the catalytic domain is a zinc dependent cytidine deaminase domain and is important for cytidine deamination. APOBEC family members include APOBEC1, APOBEC2, APOBEC3A, APOBEC3B, APOBEC3C, APOBEC3D (“APOBEC3E” now refers to this), APOBEC3F, APOBEC3G, APOBEC3H, APOBEC4, and Activation-induced (cytidine) deaminase. In some embodiments, a deaminase incorporated into a base editor comprises all or a portion of an APOBEC1 deaminase. In some embodiments, a deaminase incorporated into a base editor comprises all or a portion of APOBEC2 deaminase. In some embodiments, a deaminase incorporated into a base editor comprises all or a portion of is an APOBEC3 deaminase. In some embodiments, a deaminase incorporated into a base editor comprises all or a portion of an APOBEC3A deaminase. In some embodiments, a deaminase incorporated into a base editor comprises all or a portion of APOBEC3B deaminase. In some embodiments, a deaminase incorporated into a base editor comprises all or a portion of APOBEC3C deaminase. In some embodiments, a deaminase incorporated into a base editor comprises all or a portion of APOBEC3D deaminase. In some embodiments, a deaminase incorporated into a base editor comprises all or a portion of APOBEC3E deaminase. In some embodiments, a deaminase incorporated into a base editor comprises all or a portion of APOBEC3F deaminase. In some embodiments, a deaminase incorporated into a base editor comprises all or a portion of APOBEC3G deaminase. In some embodiments, a deaminase incorporated into a base editor comprises all or a portion of APOBEC3H deaminase. In some embodiments, a deaminase incorporated into a base editor comprises all or a portion of APOBEC4 deaminase. In some embodiments, a deaminase incorporated into a base editor comprises all or a portion of activation-induced deaminase (AID). In some embodiments a deaminase incorporated into a base editor comprises all or a portion of cytidine deaminase 1 (CDA1). It should be appreciated that a base editor can comprise a deaminase from any suitable organism (e.g., a human or a rat). In some embodiments, a deaminase domain of a base editor is from a human, chimpanzee, gorilla, monkey, cow, dog, rat, or mouse. In some embodiments, the deaminase domain of the base editor is derived from rat (e.g., rat APOBEC1). In some embodiments, the deaminase domain of the base editor is human APOBEC1. In some embodiments, the deaminase domain of the base editor is pmCDA1.

[0475] Other exemplary deaminases that can be fused to Cas9 according to aspects of this disclosure are provided below. In embodiments, the deaminases are activation-induced deaminases (AID). It should be understood that, in some embodiments, the active domain of the respective sequence can be used, e.g., the domain without a localizing signal (nuclear localization sequence, without nuclear export signal, cytoplasmic localizing signal).

[0476] Some aspects of the present disclosure are based on the recognition that modulating the deaminase domain catalytic activity of any of the fusion proteins described herein, for example by making point mutations in the deaminase domain, affect the processivity of the fusion proteins (e.g., base editors). For example, mutations that reduce, but do not eliminate, the catalytic activity of a deaminase domain within a base editing fusion protein can make it less likely that the deaminase domain will catalyze the deamination of a residue adjacent to a target residue, thereby narrowing the deamination window. The ability to narrow the deamination window can prevent unwanted deamination of residues adjacent to specific target residues, which can decrease or prevent off-target effects.

[0477] For example, in some embodiments, an APOBEC deaminase incorporated into a base editor can comprise one or more mutations selected from the group consisting of H121X, H122X, R126X, R126X, R118X, W90X, W90X, and R132X of rAPOBEC1, or one or more corresponding mutations in another APOBEC deaminase, wherein X is any amino acid. In some embodiments, an APOBEC deaminase incorporated into a base editor can comprise one or more mutations selected from the group consisting of H121R, H122R, R126A, R126E, R118A, W90A, W90Y, and R132E of rAPOBEC1, or one or more corresponding mutations in another APOBEC deaminase.

[0478] In some embodiments, an APOBEC deaminase incorporated into a base editor can comprise one or more mutations selected from the group consisting of D316X, D317X, R320X, R320X, R313X, W285X, W285X, R326X of hAPOBEC3G, or one or more corresponding mutations in another APOBEC deaminase, wherein X is any amino acid. In some embodiments, any of the fusion proteins provided herein comprise an APOBEC deaminase comprising one or more mutations selected from the group consisting of D316R, D317R, R320A, R320E, R313A, W285A, W285Y, R326E of hAPOBEC3G, or one or more corresponding mutations in another APOBEC deaminase.

[0479] In some embodiments, an APOBEC deaminase incorporated into a base editor can comprise a H121R and a H122R mutation of rAPOBEC1, or one or more corresponding mutations in another APOBEC deaminase. In some embodiments an APOBEC deaminase incorporated into a base editor can comprise an APOBEC deaminase comprising a R126A mutation of rAPOBEC1, or one or more corresponding mutations in another APOBEC deaminase. In some embodiments, an APOBEC deaminase incorporated into a base editor can comprise an APOBEC deaminase comprising a R126E mutation of rAPOBEC1, or one or more corresponding mutations in another APOBEC deaminase. In some embodiments, an APOBEC deaminase incorporated into a base editor can comprise an APOBEC deaminase comprising a R118A mutation of rAPOBEC1, or one or more corresponding mutations in another APOBEC deaminase. In some embodiments, an APOBEC deaminase incorporated into a base editor can comprise an APOBEC deaminase comprising a W90A mutation of rAPOBEC1, or one or more corresponding mutations in another APOBEC deaminase. In some embodiments, an APOBEC deaminase incorporated into a base editor can comprise an APOBEC deaminase comprising a W90Y mutation of rAPOBEC1, or one or more corresponding mutations in another APOBEC deaminase. In some embodiments, an APOBEC deaminase incorporated into a base editor can comprise an APOBEC deaminase comprising a R132E mutation of rAPOBEC1, or one or more corresponding mutations in another APOBEC deaminase. In some embodiments an APOBEC deaminase incorporated into a base editor can comprise an APOBEC deaminase comprising a W90Y and a R126E mutation of rAPOBEC1, or one or more corresponding mutations in another APOBEC deaminase. In some embodiments, an APOBEC deaminase incorporated into a base editor can comprise an APOBEC deaminase comprising a R126E and a R132E mutation of rAPOBEC1, or one or more corresponding mutations in another APOBEC deaminase. In some embodiments, an APOBEC deaminase incorporated into a base editor can comprise an APOBEC deaminase comprising a W90Y and a R132E mutation of rAPOBEC1, or one or more corresponding mutations in another APOBEC deaminase. In some embodiments, an APOBEC deaminase incorporated into a base editor can comprise an APOBEC deaminase comprising a W90Y, R126E, and R132E mutation of rAPOBEC1, or one or more corresponding mutations in another APOBEC deaminase.

[0480] In some embodiments, an APOBEC deaminase incorporated into a base editor can comprise an APOBEC deaminase comprising a D316R and a D317R mutation of hAPOBEC3G, or one or more corresponding mutations in another APOBEC deaminase. In some embodiments, any of the fusion proteins provided herein comprise an APOBEC deaminase comprising a R320A mutation of hAPOBEC3G, or one or more corresponding mutations in another APOBEC deaminase. In some embodiments, an APOBEC deaminase incorporated into a base editor can comprise an APOBEC deaminase comprising a R320E mutation of hAPOBEC3G, or one or more corresponding mutations in another APOBEC deaminase. In some embodiments, an APOBEC deaminase incorporated into a base editor can comprise an APOBEC deaminase comprising a R313A mutation of hAPOBEC3G, or one or more corresponding mutations in another APOBEC deaminase. In some embodiments, an APOBEC deaminase incorporated into a base editor can comprise an APOBEC deaminase comprising a W285A mutation of hAPOBEC3G, or one or more corresponding mutations in another APOBEC deaminase. In some embodiments, an APOBEC deaminase incorporated into a base editor can comprise an APOBEC deaminase comprising a W285Y mutation of hAPOBEC3G, or one or more corresponding mutations in another APOBEC deaminase. In some embodiments, an APOBEC deaminase incorporated into a base editor can comprise an APOBEC deaminase comprising a R326E mutation of hAPOBEC3G, or one or more corresponding mutations in another APOBEC deaminase. In some embodiments, an APOBEC deaminase incorporated into a base editor can comprise an APOBEC deaminase comprising a W285Y and a R320E mutation of hAPOBEC3G, or one or more corresponding mutations in another APOBEC deaminase. In some embodiments, an APOBEC deaminase incorporated into a base editor can comprise an APOBEC deaminase comprising a R320E and a R326E mutation of hAPOBEC3G, or one or more corresponding mutations in another APOBEC deaminase. In some embodiments, an APOBEC deaminase incorporated into a base editor can comprise an APOBEC deaminase comprising a W285Y and a R326E mutation of hAPOBEC3G, or one or more corresponding mutations in another APOBEC deaminase. In some embodiments, an APOBEC deaminase incorporated into a base editor can comprise an APOBEC deaminase comprising a W285Y, R320E, and R326E mutation of hAPOBEC3G, or one or more corresponding mutations in another APOBEC deaminase.

[0481] A number of modified cytidine deaminases are commercially available, including, but not limited to, SaBE3, SaKKH-BE3, VQR-BE3, EQR-BE3, VRER-BE3, YE1-BE3, EE-BE3, YE2-BE3, and YEE-BE3, which are available from Addgene (plasmids 85169, 85170, 85171, 85172, 85173, 85174, 85175, 85176, 85177). In some embodiments, a deaminase incorporated into a base editor comprises all or a portion of an APOBEC1 deaminase.

[0482] Details of C to T nucleobase editing proteins are described in International PCT Application No. PCT/US2016/058344 (WO2017/070632) and Komor, A. C., et al., “Programmable editing of a target base in genomic DNA without double-stranded DNA cleavage” Nature 533, 420-424 (2016), the entire contents of which are hereby incorporated by reference.

### Cytidine Deaminases

[0483] In some embodiments, the fusion proteins of the invention comprise one or more cytidine deaminase domains. In some embodiments, the cytidine deaminases provided herein are capable of deaminating cytosine or 5-methylcytosine to uracil or thymine. In some embodiments, the cytidine deaminases provided herein are capable of deaminating cytosine in DNA. The cytidine deaminase may be derived from any suitable organism. In some embodiments, the cytidine deaminase is a naturally-occurring cytidine deaminase that includes one or more mutations corresponding to any of the mutations provided herein. One of skill in the art will be able to identify the corresponding residue in any homologous protein, e.g., by sequence alignment and determination of homologous residues. Accordingly, one of skill in the art would be able to generate mutations in any naturally-occurring cytidine deaminase that corresponds to any of the mutations described herein. In some embodiments, the cytidine deaminase is from a prokaryote. In some embodiments, the cytidine deaminase is from a bacterium. In some embodiments, the cytidine deaminase is from a mammal (e.g., human).

[0484] In some embodiments, the cytidine deaminase comprises an amino acid sequence that is at least 60%, at least 65%, at least 70%, at least 75%, at least 80%, at least 85%, at least 90%, at least 95%, at least 96%, at least 97%, at least 98%, at least 99%, or at least 99.5% identical to any one of the cytidine deaminase amino acid sequences set forth herein. It should be appreciated that cytidine deaminases provided herein may include one or more mutations (e.g., any of the mutations provided herein). Some embodiments provide a polynucleotide molecule encoding the cytidine deaminase nucleobase editor polypeptide of any previous aspect or as delineated herein. In some embodiments, the polynucleotide is codon optimized.

[0485] The disclosure provides any deaminase domains with a certain percent identity plus any of the mutations or combinations thereof described herein. In some embodiments, the cytidine deaminase comprises an amino acid sequence that has 1, 2, 3, 4, 5, 6, 7, 8, 9, 10, 11, 12, 13, 14, 15, 16, 17, 18, 19, 20, 21, 22, 21, 24, 25, 26, 27, 28, 29, 30, 31, 32, 33, 34, 35, 36, 37, 38, 39, 40, 41, 42, 43, 44, 45, 46, 47, 48, 49, 50, or more mutations compared to a reference sequence, or any of the cytidine deaminases provided herein. In some embodiments, the cytidine deaminase comprises an amino acid sequence that has at least 5, at least 10, at least 15, at least 20, at least 25, at least 30, at least 35, at least 40, at least 45, at least 50, at least 60, at least 70, at least 80, at least 90, at least 100, at least 110, at least 120, at least 130, at least 140, at least 150, at least 160, or at least 170 identical contiguous amino acid residues as compared to any one of the amino acid sequences known in the art or described herein.

[0486] A fusion protein of the invention second protein comprises two or more nucleic acid editing domains.

### Guide Polynucleotides

[0487] A polynucleotide programmable nucleotide binding domain, when in conjunction with a bound guide polynucleotide (e.g., gRNA), can specifically bind to a target polynucleotide sequence (i.e., via complementary base pairing between bases of the bound guide nucleic acid and bases of the target polynucleotide sequence) and thereby localize the base editor to the target nucleic acid sequence desired to be edited. In some embodiments, the target polynucleotide sequence comprises single-stranded DNA or double-stranded DNA. In some embodiments, the target polynucleotide sequence comprises RNA. In some embodiments, the target polynucleotide sequence comprises a DNA-RNA hybrid.

[0488] CRISPR is an adaptive immune system that provides protection against mobile genetic elements (viruses, transposable elements and conjugative plasmids). CRISPR clusters contain spacers, sequences complementary to antecedent mobile elements, and target invading nucleic acids. CRISPR clusters are transcribed and processed into CRISPR RNA (crRNA). In type II CRISPR systems, correct processing of pre-crRNA requires a trans-encoded small RNA (tracrRNA), endogenous ribonuclease 3 (mc) and a Cas9 protein. The tracrRNA serves as a guide for ribonuclease 3-aided processing of pre-crRNA. Subsequently, Cas9/crRNA/tracrRNA endonucleolytically cleaves linear or circular dsDNA target complementary to the spacer. The target strand not complementary to crRNA is first cut endonucleolytically, and then trimmed 3′-5′ exonucleolytically. In nature, DNA-binding and cleavage typically requires protein and both RNAs. However, single guide RNAs (“sgRNA”, or simply “gRNA”) can be engineered so as to incorporate aspects of both the crRNA and tracrRNA into a single RNA species. See, e.g., Jinek M., Chylinski K., Fonfara I., Hauer M., Doudna J. A., Charpentier E. Science 337:816-821(2012), the entire contents of which is hereby incorporated by reference. Cas9 recognizes a short motif in the CRISPR repeat sequences (the PAM or protospacer adjacent motif) to help distinguish self versus non-self. See e.g., “Complete genome sequence of an M1 strain of Streptococcus pyogenes.” Ferretti, J. J. et al., Natl. Acad. Sci. U.S.A. 98:4658-4663(2001); “CRISPR RNA maturation by trans-encoded small RNA and host factor RNase III.” Deltcheva E. et al., Nature 471:602-607(2011); and “Programmable dual-RNA-guided DNA endonuclease in adaptive bacterial immunity.” Jinek M. et al, Science 337:816-821(2012), the entire contents of each of which are incorporated herein by reference).

[0489] The PAM sequence can be any PAM sequence known in the art. Suitable PAM sequences include, but are not limited to, NGG, NGA, NGC, NGN, NGT, NGCG, NGAG, NGAN, NGNG, NGCN, NGCG, NGTN, NNGRRT, NNNRRT, NNGRR(N), TTTV, TYCV, TYCV, TATV, NNNNGATT, NNAGAAW, or NAAAAC. Y is a pyrimidine; N is any nucleotide base; W is A or T.

[0490] In an embodiment, a guide polynucleotide described herein can be RNA or DNA. In one embodiment, the guide polynucleotide is a gRNA. An RNA/Cas complex can assist in “guiding” a Cas protein to a target DNA. Cas9/crRNA/tracrRNA endonucleolytically cleaves linear or circular dsDNA target complementary to the spacer. The target strand not complementary to crRNA is first cut endonucleolytically, then trimmed 3′-5′ exonucleolytically. In nature, DNA-binding and cleavage typically requires protein and both RNAs. However, single guide RNAs (“sgRNA”, or simply “gRNA”) can be engineered so as to incorporate aspects of both the crRNA and tracrRNA into a single RNA species. See, e.g., Jinek M. et al., Science 337:816-821(2012), the entire contents of which is hereby incorporated by reference.

[0491] In some embodiments, the guide polynucleotide is at least one single guide RNA (“sgRNA” or “gRNA”). In some embodiments, a guide polynucleotide comprises two or more individual polynucleotides, which can interact with one another via for example complementary base pairing (e.g., a dual guide polynucleotide, dual gRNA). For example, a guide polynucleotide can comprise a CRISPR RNA (crRNA) and a trans-activating CRISPR RNA (tracrRNA) or can comprise one or more trans-activating CRISPR RNA (tracrRNA).

[0492] In some embodiments, the guide polynucleotide is at least one tracrRNA. In some embodiments, the guide polynucleotide does not require PAM sequence to guide the polynucleotide-programmable DNA-binding domain (e.g., Cas9 or Cpf1) to the target nucleotide sequence.

[0493] A guide polynucleotide may include natural or non-natural (or unnatural) nucleotides (e.g., peptide nucleic acid or nucleotide analogs). In some cases, the targeting region of a guide nucleic acid sequence can be at least 15, 16, 17, 18, 19, 20, 21, 22, 23, 24, 25, 26, 27, 28, 29, or 30 nucleotides in length. A targeting region of a guide nucleic acid can be between 10-30 nucleotides in length, or between 15-25 nucleotides in length, or between 15-20 nucleotides in length.

[0494] In some embodiments, the base editor provided herein utilizes one or more guide polynucleotide (e.g., multiple gRNA). In some embodiments, a single guide polynucleotide is utilized for different base editors described herein. For example, a single guide polynucleotide can be utilized for a cytidine base editor and an adenosine base editor.

[0495] In some embodiments, the methods described herein can utilize an engineered Cas protein. A guide RNA (gRNA) is a short synthetic RNA composed of a scaffold sequence necessary for Cas-binding and a user-defined ˜20 nucleotide spacer that defines the genomic target to be modified. Exemplary gRNA scaffold sequences are provided in the sequence listing as SEQ ID NOs: 224-230, 223, 3000, and 243-245. Thus, a skilled artisan can change the genomic target of the Cas protein specificity is partially determined by how specific the gRNA targeting sequence is for the genomic target compared to the rest of the genome.

[0496] In other embodiments, a guide polynucleotide can comprise both the polynucleotide targeting portion of the nucleic acid and the scaffold portion of the nucleic acid in a single molecule (i.e., a single-molecule guide nucleic acid). For example, a single-molecule guide polynucleotide can be a single guide RNA (sgRNA or gRNA). Herein the term guide polynucleotide sequence contemplates any single, dual or multi-molecule nucleic acid capable of interacting with and directing a base editor to a target polynucleotide sequence.

[0497] Typically, a guide polynucleotide (e.g., crRNA/trRNA complex or a gRNA) comprises a “polynucleotide-targeting segment” that includes a sequence capable of recognizing and binding to a target polynucleotide sequence, and a “protein-binding segment” that stabilizes the guide polynucleotide within a polynucleotide programmable nucleotide binding domain component of a base editor. In some embodiments, the polynucleotide targeting segment of the guide polynucleotide recognizes and binds to a DNA polynucleotide, thereby facilitating the editing of a base in DNA. In other cases, the polynucleotide targeting segment of the guide polynucleotide recognizes and binds to an RNA polynucleotide, thereby facilitating the editing of a base in RNA. Herein a “segment” refers to a section or region of a molecule, e.g., a contiguous stretch of nucleotides in the guide polynucleotide. A segment can also refer to a region/section of a complex such that a segment can comprise regions of more than one molecule. For example, where a guide polynucleotide comprises multiple nucleic acid molecules, the protein-binding segment of can include all or a portion of multiple separate molecules that are for instance hybridized along a region of complementarity. In some embodiments, a protein-binding segment of a DNA-targeting RNA that comprises two separate molecules can comprise (i) base pairs 40-75 of a first RNA molecule that is 100 base pairs in length; and (ii) base pairs 10-25 of a second RNA molecule that is 50 base pairs in length. The definition of “segment,” unless otherwise specifically defined in a particular context, is not limited to a specific number of total base pairs, is not limited to any particular number of base pairs from a given RNA molecule, is not limited to a particular number of separate molecules within a complex, and can include regions of RNA molecules that are of any total length and can include regions with complementarity to other molecules.

[0498] The guide polynucleotides can be synthesized chemically, synthesized enzymatically, or a combination thereof. For example, the gRNA can be synthesized using standard phosphoramidite-based solid-phase synthesis methods. Alternatively, the gRNA can be synthesized in vitro by operably linking DNA encoding the gRNA to a promoter control sequence that is recognized by a phage RNA polymerase. Examples of suitable phage promoter sequences include T7, T3, SP6 promoter sequences, or variations thereof. In embodiments in which the gRNA comprises two separate molecules (e.g., crRNA and tracrRNA), the crRNA can be chemically synthesized and the tracrRNA can be enzymatically synthesized.

A gRNA molecule can be transcribed in vitro.

[0499] A guide polynucleotide may be expressed, for example, by a DNA that encodes the gRNA, e.g., a DNA vector comprising a sequence encoding the gRNA. The gRNA may be encoded alone or together with an encoded base editor. Such DNA sequences may be introduced into an expression system, e.g., a cell, together or separately. For example, DNA sequences encoding a polynucleotide programmable nucleotide binding domain and a gRNA may be introduced into a cell, each DNA sequence can be part of a separate molecule (e.g., one vector containing the polynucleotide programmable nucleotide binding domain coding sequence and a second vector containing the gRNA coding sequence) or both can be part of a same molecule (e.g., one vector containing coding (and regulatory) sequence for both the polynucleotide programmable nucleotide binding domain and the gRNA). An RNA can be transcribed from a synthetic DNA molecule, e.g., a gBlocks® gene fragment.

[0500] A gRNA or a guide polynucleotide can comprise three regions: a first region at the 5′ end that can be complementary to a target site in a chromosomal sequence, a second internal region that can form a stem loop structure, and a third 3′ region that can be single-stranded. A first region of each gRNA can also be different such that each gRNA guides a fusion protein to a specific target site. Further, second and third regions of each gRNA can be identical in all gRNAs.

[0501] A first region of a gRNA or a guide polynucleotide can be complementary to sequence at a target site in a chromosomal sequence such that the first region of the gRNA can base pair with the target site. In some cases, a first region of a gRNA can comprise from or from about 10 nucleotides to 25 nucleotides (i.e., from 10 nucleotides to nucleotides; or from about 10 nucleotides to about 25 nucleotides; or from 10 nucleotides to about 25 nucleotides; or from about 10 nucleotides to 25 nucleotides) or more. For example, a region of base pairing between a first region of a gRNA and a target site in a chromosomal sequence can be or can be about 10, 11, 12, 13, 14, 15, 16, 17, 18, 19, 20, 22, 23, 24, 25, or more nucleotides in length. Sometimes, a first region of a gRNA can be or can be about 19, 20, or 21 nucleotides in length.

[0502] A gRNA or a guide polynucleotide can also comprise a second region that forms a secondary structure. For example, a secondary structure formed by a gRNA can comprise a stem (or hairpin) and a loop. A length of a loop and a stem can vary. For example, a loop can range from or from about 3 to 10 nucleotides in length, and a stem can range from or from about 6 to 20 base pairs in length. A stem can comprise one or more bulges of 1 to 10 or about 10 nucleotides. The overall length of a second region can range from or from about 16 to 60 nucleotides in length. For example, a loop can be or can be about 4 nucleotides in length and a stem can be or can be about 12 base pairs.

[0503] A gRNA or a guide polynucleotide can also comprise a third region at the 3′ end that can be essentially single-stranded. For example, a third region is sometimes not complementarity to any chromosomal sequence in a cell of interest and is sometimes not complementarity to the rest of a gRNA. Further, the length of a third region can vary. A third region can be more than or more than about 4 nucleotides in length. For example, the length of a third region can range from or from about 5 to 60 nucleotides in length.

[0504] A gRNA or a guide polynucleotide can target any exon or intron of a gene target. In some cases, a guide can target exon 1 or 2 of a gene, in other cases; a guide can target exon 3 or 4 of a gene. In some embodiments, a composition comprises multiple gRNAs that all target the same exon or multiple gRNAs that target different exons. An exon and/or an intron of a gene can be targeted.

[0505] A gRNA or a guide polynucleotide can target a nucleic acid sequence of about 20 nucleotides or less than about 20 nucleotides (e.g., at least about 5, 10, 15, 16, 17, 18, 19, 20, 21, 22, 23, 24, 25, 30 nucleotides), or anywhere between about 1-100 nucleotides (e.g., 5, 10, 15, 16, 17, 18, 19, 20, 21, 22, 23, 24, 25, 30, 40, 50, 60, 70, 80, 90, 100). A target nucleic acid sequence can be or can be about 20 bases immediately 5′ of the first nucleotide of the PAM. A gRNA can target a nucleic acid sequence. A target nucleic acid can be at least or at least about 1-10, 1-20, 1-30, 1-40, 1-50, 1-60, 1-70, 1-80, 1-90, or 1-100 nucleotides.

[0506] Methods for selecting, designing, and validating guide polynucleotides, e.g., gRNAs and targeting sequences are described herein and known to those skilled in the art. For example, to minimize the impact of potential substrate promiscuity of a deaminase domain in the nucleobase editor system (e.g., an AID domain), the number of residues that could unintentionally be targeted for deamination (e.g., off-target C residues that could potentially reside on single strand DNA within the target nucleic acid locus) may be minimized. In addition, software tools can be used to optimize the gRNAs corresponding to a target nucleic acid sequence, e.g., to minimize total off-target activity across the genome. For example, for each possible targeting domain choice using S. pyogenes Cas9, all off-target sequences (preceding selected PAMs, e.g., NAG or NGG) may be identified across the genome that contain up to certain number (e.g., 1, 2, 3, 4, 5, 6, 7, 8, 9, or 10) of mismatched base-pairs. First regions of gRNAs complementary to a target site can be identified, and all first regions (e.g., crRNAs) can be ranked according to its total predicted off-target score; the top-ranked targeting domains represent those that are likely to have the greatest on-target and the least off-target activity. Candidate targeting gRNAs can be functionally evaluated by using methods known in the art and/or as set forth herein.

[0507] As a non-limiting example, target DNA hybridizing sequences in crRNAs of a gRNA for use with Cas9s may be identified using a DNA sequence searching algorithm. gRNA design is carried out using custom gRNA design software based on the public tool cas-offinder as described in Bae S., Park J., & Kim J.-S. Cas-OFFinder: A fast and versatile algorithm that searches for potential off-target sites of Cas9 RNA-guided endonucleases. Bioinformatics 30, 1473-1475 (2014). This software scores guides after calculating their genome-wide off-target propensity. Typically matches ranging from perfect matches to 7 mismatches are considered for guides ranging in length from 17 to 24. Once the off-target sites are computationally-determined, an aggregate score is calculated for each guide and summarized in a tabular output using a web-interface. In addition to identifying potential target sites adjacent to PAM sequences, the software also identifies all PAM adjacent sequences that differ by 1, 2, 3 or more than 3 nucleotides from the selected target sites. Genomic DNA sequences for a target nucleic acid sequence, e.g., a target gene may be obtained and repeat elements may be screened using publicly available tools, for example, the RepeatMasker program. RepeatMasker searches input DNA sequences for repeated elements and regions of low complexity. The output is a detailed annotation of the repeats present in a given query sequence.

[0508] Following identification, first regions of gRNAs, e.g., crRNAs, are ranked into tiers based on their distance to the target site, their orthogonality and presence of 5′ nucleotides for close matches with relevant PAM sequences (for example, a 5′ G based on identification of close matches in the human genome containing a relevant PAM e.g., NGG PAM for S. pyogenes, NNGRRT or NNGRRV PAM for S. aureus). As used herein, orthogonality refers to the number of sequences in the human genome that contain a minimum number of mismatches to the target sequence. A “high level of orthogonality” or “good orthogonality” may, for example, refer to 20-mer targeting domains that have no identical sequences in the human genome besides the intended target, nor any sequences that contain one or two mismatches in the target sequence. Targeting domains with good orthogonality may be selected to minimize off-target DNA cleavage.

[0509] A gRNA can then be introduced into a cell or embryo as an RNA molecule or a non-RNA nucleic acid molecule, e.g., DNA molecule. In one embodiment, a DNA encoding a gRNA is operably linked to promoter control sequence for expression of the gRNA in a cell or embryo of interest. A RNA coding sequence can be operably linked to a promoter sequence that is recognized by RNA polymerase III (Pol III). Plasmid vectors that can be used to express gRNA include, but are not limited to, px330 vectors and px333 vectors. In some cases, a plasmid vector (e.g., px333 vector) can comprise at least two gRNA-encoding DNA sequences. Further, a vector can comprise additional expression control sequences (e.g., enhancer sequences, Kozak sequences, polyadenylation sequences, transcriptional termination sequences, etc.), selectable marker sequences (e.g., GFP or antibiotic resistance genes such as puromycin), origins of replication, and the like. A DNA molecule encoding a gRNA can also be linear. A DNA molecule encoding a gRNA or a guide polynucleotide can also be circular.

[0510] In some embodiments, a reporter system is used for detecting base-editing activity and testing candidate guide polynucleotides. In some embodiments, a reporter system comprises a reporter gene based assay where base editing activity leads to expression of the reporter gene. For example, a reporter system may include a reporter gene comprising a deactivated start codon, e.g., a mutation on the template strand from 3′-TAC-S′ to 3′-CAC-S′. Upon successful deamination of the target C, the corresponding mRNA will be transcribed as 5′-AUG-3′ instead of 5′-GUG-3′, enabling the translation of the reporter gene. Suitable reporter genes will be apparent to those of skill in the art. Non-limiting examples of reporter genes include gene encoding green fluorescence protein (GFP), red fluorescence protein (RFP), luciferase, secreted alkaline phosphatase (SEAP), or any other gene whose expression are detectable and apparent to those skilled in the art. The reporter system can be used to test many different gRNAs, e.g., in order to determine which residue(s) with respect to the target DNA sequence the respective deaminase will target. sgRNAs that target non-template strand can also be tested in order to assess off-target effects of a specific base editing protein, e.g., a Cas9 deaminase fusion protein. In some embodiments, such gRNAs can be designed such that the mutated start codon will not be base-paired with the gRNA. The guide polynucleotides can comprise standard ribonucleotides, modified ribonucleotides (e.g., pseudouridine), ribonucleotide isomers, and/or ribonucleotide analogs. In some embodiments, the guide polynucleotide can comprise at least one detectable label. The detectable label can be a fluorophore (e.g., FAM, TMR, Cy3, Cy5, Texas Red, Oregon Green, Alexa Fluors, Halo tags, or suitable fluorescent dye), a detection tag (e.g., biotin, digoxigenin, and the like), quantum dots, or gold particles.

[0511] In some embodiments, a base editor system may comprise multiple guide polynucleotides, e.g., gRNAs. For example, the gRNAs may target to one or more target loci (e.g., at least 1 gRNA, at least 2 gRNA, at least 5 gRNA, at least 10 gRNA, at least 20 gRNA, at least 30 g RNA, at least 50 gRNA) comprised in a base editor system. The multiple gRNA sequences can be tandemly arranged and are preferably separated by a direct repeat.

[0512] A guide polynucleotide can comprise one or more modifications to provide a nucleic acid with a new or enhanced feature. A guide polynucleotide can comprise a nucleic acid affinity tag. A guide polynucleotide can comprise synthetic nucleotide, synthetic nucleotide analog, nucleotide derivatives, and/or modified nucleotides.

[0513] In some cases, a gRNA or a guide polynucleotide can comprise modifications. A modification can be made at any location of a gRNA or a guide polynucleotide. More than one modification can be made to a single gRNA or a guide polynucleotide. A gRNA or a guide polynucleotide can undergo quality control after a modification. In some cases, quality control can include PAGE, HPLC, MS, or any combination thereof.

[0514] A modification of a gRNA or a guide polynucleotide can be a substitution, insertion, deletion, chemical modification, physical modification, stabilization, purification, or any combination thereof.

[0515] A gRNA or a guide polynucleotide can also be modified by 5′ adenylate, 5′ guanosine-triphosphate cap, 5′ N7-Methylguanosine-triphosphate cap, 5′ triphosphate cap, 3′ phosphate, 3′ thiophosphate, 5′ phosphate, 5′ thiophosphate, Cis-Syn thymidine dimer, trimers, C12 spacer, C3 spacer, C6 spacer, dSpacer, PC spacer, rSpacer, Spacer 18, Spacer 9, 3′-3′ modifications, 5′-5′ modifications, abasic, acridine, azobenzene, biotin, biotin BB, biotin TEG, cholesteryl TEG, desthiobiotin TEG, DNP TEG, DNP-X, DOTA, dT-Biotin, dual biotin, PC biotin, psoralen C2, psoralen C6, TINA, 3′ DABCYL, black hole quencher 1, black hole quencer 2, DABCYL SE, dT-DABCYL, IRDye QC-1, QSY-21, QSY-35, QSY-7, QSY-9, carboxyl linker, thiol linkers, 2′-deoxyribonucleoside analog purine, 2′-deoxyribonucleoside analog pyrimidine, ribonucleoside analog, 2′-O-methyl ribonucleoside analog, sugar modified analogs, wobble/universal bases, fluorescent dye label, 2′-fluoro RNA, 2′-O-methyl RNA, methylphosphonate, phosphodiester DNA, phosphodiester RNA, phosphothioate DNA, phosphorothioate RNA, UNA, pseudouridine-5′-triphosphate, 5′-methylcytidine-5′-triphosphate, or any combination thereof.

[0516] In some cases, a modification is permanent. In other cases, a modification is transient. In some cases, multiple modifications are made to a gRNA or a guide polynucleotide. A gRNA or a guide polynucleotide modification can alter physiochemical properties of a nucleotide, such as their conformation, polarity, hydrophobicity, chemical reactivity, base-pairing interactions, or any combination thereof.

[0517] A guide polynucleotide can be transferred into a cell by transfecting the cell with an isolated gRNA or a plasmid DNA comprising a sequence coding for the guide RNA and a promoter. A gRNA or a guide polynucleotide can also be transferred into a cell in other way, such as using virus-mediated gene delivery. A gRNA or a guide polynucleotide can be isolated. For example, a gRNA can be transfected in the form of an isolated RNA into a cell or organism. A gRNA can be prepared by in vitro transcription using any in vitro transcription system known in the art. A gRNA can be transferred to a cell in the form of isolated RNA rather than in the form of plasmid comprising encoding sequence for a gRNA.

[0518] A modification can also be a phosphorothioate substitute. In some cases, a natural phosphodiester bond can be susceptible to rapid degradation by cellular nucleases and; a modification of internucleotide linkage using phosphorothioate (PS) bond substitutes can be more stable towards hydrolysis by cellular degradation. A modification can increase stability in a gRNA or a guide polynucleotide. A modification can also enhance biological activity. In some cases, a phosphorothioate enhanced RNA gRNA can inhibit RNase A, RNase T1, calf serum nucleases, or any combinations thereof. These properties can allow the use of PS-RNA gRNAs to be used in applications where exposure to nucleases is of high probability in vivo or in vitro. For example, phosphorothioate (PS) bonds can be introduced between the last 3-5 nucleotides at the 5′- or “-end of a gRNA which can inhibit exonuclease degradation. In some cases, phosphorothioate bonds can be added throughout an entire gRNA to reduce attack by endonucleases.

[0519] In some embodiments, the guide RNA is designed to disrupt a splice site (i.e., a splice acceptor (SA) or a splice donor (SD). In some embodiments, the guide RNA is designed such that the base editing results in a premature STOP codon.

### Protospacer Adjacent Motif

[0520] The term “protospacer adjacent motif (PAM)” or PAM-like motif refers to a 2-6 base pair DNA sequence immediately following the DNA sequence targeted by the Cas9 nuclease in the CRISPR bacterial adaptive immune system. In some embodiments, the PAM can be a 5′ PAM (i.e., located upstream of the 5′ end of the protospacer). In other embodiments, the PAM can be a 3′ PAM (i.e., located downstream of the 5′ end of the protospacer). The PAM sequence is essential for target binding, but the exact sequence depends on a type of Cas protein. The PAM sequence can be any PAM sequence known in the art. Suitable PAM sequences include, but are not limited to, NGG, NGA, NGC, NGN, NGT, NGTT, NGCG, NGAG, NGAN, NGNG, NGCN, NGCG, NGTN, NNGRRT, NNNRRT, NNGRR(N), TTTV, TYCV, TYCV, TATV, NNNNGATT, NNAGAAW, or NAAAAC. Y is a pyrimidine; N is any nucleotide base; W is A or T.

[0521] A base editor provided herein can comprise a CRISPR protein-derived domain that is capable of binding a nucleotide sequence that contains a canonical or non-canonical protospacer adjacent motif (PAM) sequence. A PAM site is a nucleotide sequence in proximity to a target polynucleotide sequence. Some aspects of the disclosure provide for base editors comprising all or a portion of CRISPR proteins that have different PAM specificities.

[0522] For example, typically Cas9 proteins, such as Cas9 from S. pyogenes (spCas9), require a canonical NGG PAM sequence to bind a particular nucleic acid region, where the “N” in “NGG” is adenine (A), thymine (T), guanine (G), or cytosine (C), and the G is guanine. A PAM can be CRISPR protein-specific and can be different between different base editors comprising different CRISPR protein-derived domains. A PAM can be 5′ or 3′ of a target sequence. A PAM can be upstream or downstream of a target sequence. A PAM can be 1, 2, 3, 4, 5, 6, 7, 8, 9, 10 or more nucleotides in length. Often, a PAM is between 2-6 nucleotides in length.

[0523] In some embodiments, the PAM is an “NRN” PAM where the “N” in “NRN” is adenine (A), thymine (T), guanine (G), or cytosine (C), and the R is adenine (A) or guanine (G); or the PAM is an “NYN” PAM, wherein the “N” in NYN is adenine (A), thymine (T), guanine (G), or cytosine (C), and the Y is cytidine (C) or thymine (T), for example, as described in R. T. Walton et al., 2020, Science, 10.1126/science.aba8853 (2020), the entire contents of which are incorporated herein by reference.

[0524] Several PAM variants are described in Table 6 below.

TABLE 6
Cas9 proteins and corresponding
PAM sequences

| Variant | PAM |
|---|---|
| spCas9 | NGG |
| spCas9-VRQR | NGA |
| spCas9-VRER | NGCG |
| xCas9(sp) | NGN |
| saCas9 | NNGRRT |
| saCas9-KKH | NNNRRT |
| spCas9-MQKSER | NGCG |
| spCas9-MQKSER | NGCN |
| spCas9-LRKIQK | NGTN |
| spCas9-LRVSQK | NGTN |
| spCas9-LRVSQL | NGTN |
| spCas9-MQKFRAER | NGC |
| Cpf1 | 5′(TTTV) |
| SpyMac | 5′-NAA-3′ |

[0525] In some embodiments, the PAM is NGC. In some embodiments, the NGC PAM is recognized by a Cas9 variant. In some embodiments, the NGC PAM variant includes one or more amino acid substitutions selected from D1135M, S1136Q, G1218K, E1219F, A1322R, D1332A, R1335E, and T1337R (collectively termed “MQKFRAER”).

[0526] In some embodiments, the PAM is NGT. In some embodiments, the NGT PAM is recognized by a Cas9 variant. In some embodiments, the NGT PAM variant is generated through targeted mutations at one or more residues 1335, 1337, 1135, 1136, 1218, and/or 1219. In some embodiments, the NGT PAM variant is created through targeted mutations at one or more residues 1219, 1335, 1337, 1218. In some embodiments, the NGT PAM variant is created through targeted mutations at one or more residues 1135, 1136, 1218, 1219, and 1335. In some embodiments, the NGT PAM variant is selected from the set of targeted mutations provided in Tables 7A and 7B below.

TABLE 7A
NGT PAM Variant Mutations at residues 1219,
1335, 1337, 1218

| Variant | E1219V | R1335Q | T1337 | G1218 |
|---|---|---|---|---|
| 1 | F | V | T | |
| 2 | F | V | R | |
| 3 | F | V | Q | |
| 4 | F | V | L | |
| 5 | F | V | T | R |
| 6 | F | V | R | R |
| 7 | F | V | Q | R |
| 8 | F | V | L | R |
| 9 | L | L | T | |
| 10 | L | L | R | |
| 11 | L | L | Q | |
| 12 | L | L | L | |
| 13 | F | I | T | |
| 14 | F | I | R | |
| 15 | F | I | Q | |
| 16 | F | I | L | |
| 17 | F | G | C | |
| 18 | H | L | N | |
| 19 | F | G | C | A |
| 20 | H | L | N | V |
| 21 | L | A | W | |
| 22 | L | A | F | |
| 23 | L | A | Y | |
| 24 | I | A | W | |
| 25 | I | A | F | |
| 26 | I | A | Y | |

TABLE 7B
NGT PAM Variant Mutations at residues
1135, 1136, 1218, 1219, and 1335

| Variant | D1135L | S1136R | G1218S | E1219V | R1335Q |
|---|---|---|---|---|---|
| 27 | G | | | | |
| 28 | V | | | | |
| 29 | I | | | | |
| 30 | | A | | | |
| 31 | | W | | | |
| 32 | | H | | | |
| 33 | | K | | | |
| 34 | | | K | | |
| 35 | | | R | | |
| 36 | | | Q | | |
| 37 | | | T | | |
| 38 | | | N | | |
| 39 | | | | I | |
| 40 | | | | A | |
| 41 | | | | N | |
| 42 | | | | Q | |
| 43 | | | | G | |
| 44 | | | | L | |
| 45 | | | | S | |
| 46 | | | | T | |
| 47 | | | | | L |
| 48 | | | | | I |
| 49 | | | | | V |
| 50 | | | | | N |
| 51 | | | | | S |
| 52 | | | | | T |
| 53 | | | | | F |
| 54 | | | | | Y |
| 55 | N1286Q | I1331F | | | |

[0527] In some embodiments, the NGT PAM variant is selected from variant 5, 7, 28, 31, or 36 in Table 7A and Table 7B. In some embodiments, the variants have improved NGT PAM recognition.

[0528] In some embodiments, the NGT PAM variants have mutations at residues 1219, 1335, 1337, and/or 1218. In some embodiments, the NGT PAM variant is selected with mutations for improved recognition from the variants provided in Table 8 below.

TABLE 8
NGT PAM Variant Mutations at residues
1219, 1335, 1337, and 1218

| Variant | E1219V | R1335Q | T1337 | G1218 |
|---|---|---|---|---|
| 1 | F | V | T | |
| 2 | F | V | R | |
| 3 | F | V | Q | |
| 4 | F | V | L | |
| 5 | F | V | T | R |
| 6 | F | V | R | R |
| 7 | F | V | Q | R |
| 8 | F | V | L | R |

[0529] In some embodiments, the NGT PAM is selected from the variants provided in Table 9 below.

TABLE 9
NGT PAM variants

| | NGTN | | | | | | | |
|---|---|---|---|---|---|---|---|---|
| | vari- | | | | | | | |
| | ant | D1135 | S1136 | G1218 | E1219 | A1322R | R1335 | T1337 |
| Vari- | LRKIQK | L | R | K | I | — | Q | K |
| ant 1 | | | | | | | | |
| Vari- | LRSVQK | L | R | S | V | — | Q | K |
| ant 2 | | | | | | | | |
| Vari- | LRSVQL | L | R | S | V | — | Q | L |
| ant 3 | | | | | | | | |
| Vari- | LRKIRQK | L | R | K | I | R | Q | K |
| ant 4 | | | | | | | | |
| Vari- | LRSVRQK | L | R | S | V | R | Q | K |
| ant 5 | | | | | | | | |
| Vari- | LRSVRQL | L | R | S | V | R | Q | L |
| ant 6 | | | | | | | | |

[0530] In some embodiments the NGTN variant is variant 1. In some embodiments, the NGTN variant is variant 2. In some embodiments, the NGTN variant is variant 3. In some embodiments, the NGTN variant is variant 4. In some embodiments, the NGTN variant is variant 5. In some embodiments, the NGTN variant is variant 6.

[0531] In some embodiments, the Cas9 domain is a Cas9 domain from Streptococcus pyogenes (SpCas9). In some embodiments, the SpCas9 domain is a nuclease active SpCas9, a nuclease inactive SpCas9 (SpCas9d), or a SpCas9 nickase (SpCas9n). In some embodiments, the SpCas9 comprises a D9X mutation, or a corresponding mutation in any of the amino acid sequences provided herein, wherein X is any amino acid except for D. In some embodiments, the SpCas9 comprises a D9A mutation, or a corresponding mutation in any of the amino acid sequences provided herein. In some embodiments, the SpCas9 domain, the SpCas9d domain, or the SpCas9n domain can bind to a nucleic acid sequence having a non-canonical PAM. In some embodiments, the SpCas9 domain, the SpCas9d domain, or the SpCas9n domain can bind to a nucleic acid sequence having an NGG, a NGA, or a NGCG PAM sequence.

[0532] In some embodiments, the SpCas9 domain comprises one or more of a D1135X, a R1335X, and a T1337X mutation, or a corresponding mutation in any of the amino acid sequences provided herein, wherein X is any amino acid. In some embodiments, the SpCas9 domain comprises one or more of a D1135E, R1335Q, and T1337R mutation, or a corresponding mutation in any of the amino acid sequences provided herein. In some embodiments, the SpCas9 domain comprises a D1135E, a R1335Q, and a T1337R mutation, or corresponding mutations in any of the amino acid sequences provided herein. In some embodiments, the SpCas9 domain comprises one or more of a D1135X, a R1335X, and a T1337X mutation, or a corresponding mutation in any of the amino acid sequences provided herein, wherein X is any amino acid. In some embodiments, the SpCas9 domain comprises one or more of a D1135V, a R1335Q, and a T1337R mutation, or a corresponding mutation in any of the amino acid sequences provided herein. In some embodiments, the SpCas9 domain comprises a D1135V, a R1335Q, and a T1337R mutation, or corresponding mutations in any of the amino acid sequences provided herein. In some embodiments, the SpCas9 domain comprises one or more of a D1135X, a G1218X, a R1335X, and a T1337X mutation, or a corresponding mutation in any of the amino acid sequences provided herein, wherein X is any amino acid. In some embodiments, the SpCas9 domain comprises one or more of a D1135V, a G1218R, a R1335Q, and a T1337R mutation, or a corresponding mutation in any of the amino acid sequences provided herein. In some embodiments, the SpCas9 domain comprises a D1135V, a G1218R, a R1335Q, and a T1337R mutation, or corresponding mutations in any of the amino acid sequences provided herein.

[0533] In some examples, a PAM recognized by a CRISPR protein-derived domain of a base editor disclosed herein can be provided to a cell on a separate oligonucleotide to an insert (e.g., an AAV insert) encoding the base editor. In such embodiments, providing PAM on a separate oligonucleotide can allow cleavage of a target sequence that otherwise would not be able to be cleaved, because no adjacent PAM is present on the same polynucleotide as the target sequence.

[0534] In an embodiment, S. pyogenes Cas9 (SpCas9) can be used as a CRISPR endonuclease for genome engineering. However, others can be used. In some embodiments, a different endonuclease can be used to target certain genomic targets. In some embodiments, synthetic SpCas9-derived variants with non-NGG PAM sequences can be used. Additionally, other Cas9 orthologues from various species have been identified and these “non-SpCas9s” can bind a variety of PAM sequences that can also be useful for the present disclosure. For example, the relatively large size of SpCas9 (approximately 4 kb coding sequence) can lead to plasmids carrying the SpCas9 cDNA that cannot be efficiently expressed in a cell. Conversely, the coding sequence for Staphylococcus aureus Cas9 (SaCas9) is approximately 1 kilobase shorter than SpCas9, possibly allowing it to be efficiently expressed in a cell. Similar to SpCas9, the SaCas9 endonuclease is capable of modifying target genes in mammalian cells in vitro and in mice in vivo. In some embodiments, a Cas protein can target a different PAM sequence. In some embodiments, a target gene can be adjacent to a Cas9 PAM, 5′-NGG, for example. In other embodiments, other Cas9 orthologs can have different PAM requirements. For example, other PAMs such as those of S. thermophilus (5′-NNAGAA for CRISPR1 and 5′-NGGNG for CRISPR3) and Neisseria meningitidis (5′-NNNNGATT) can also be found adjacent to a target gene.

[0535] In some embodiments, for a S. pyogenes system, a target gene sequence can precede (i.e., be 5′ to) a 5′-NGG PAM, and a 20-nt guide RNA sequence can base pair with an opposite strand to mediate a Cas9 cleavage adjacent to a PAM. In some embodiments, an adjacent cut can be or can be about 3 base pairs upstream of a PAM. In some embodiments, an adjacent cut can be or can be about 10 base pairs upstream of a PAM. In some embodiments, an adjacent cut can be or can be about 0-20 base pairs upstream of a PAM. For example, an adjacent cut can be next to, 1, 2, 3, 4, 5, 6, 7, 8, 9, 10, 11, 12, 13, 14, 15, 16, 17, 18, 19, 20, 21, 22, 23, 24, 25, 26, 27, 28, 29, or 30 base pairs upstream of a PAM. An adjacent cut can also be downstream of a PAM by 1 to 30 base pairs. The sequences of exemplary SpCas9 proteins capable of binding a PAM sequence follow:

[0536] In some embodiments, engineered SpCas9 variants are capable of recognizing protospacer adjacent motif (PAM) sequences flanked by a 3′ H (non-G PAM) (see Tables 2A-2D). In some embodiments, the SpCas9 variants recognize NRNH PAMs (where R is A or G and H is A, C or T). In some embodiments, the non-G PAM is NRRH, NRTH, or NRCH (see e.g., Miller, S. M., et al. Continuous evolution of SpCas9 variants compatible with non-G PAMs, Nat. Biotechnol. (2020), the contents of which is incorporated herein by reference in its entirety).

[0537] In some embodiments, the Cas9 domain is a recombinant Cas9 domain. In some embodiments, the recombinant Cas9 domain is a SpyMacCas9 domain. In some embodiments, the SpyMacCas9 domain is a nuclease active SpyMacCas9, a nuclease inactive SpyMacCas9 (SpyMacCas9d), or a SpyMacCas9 nickase (SpyMacCas9n). In some embodiments, the SaCas9 domain, the SaCas9d domain, or the SaCas9n domain can bind to a nucleic acid sequence having a non-canonical PAM. In some embodiments, the SpyMacCas9 domain, the SpCas9d domain, or the SpCas9n domain can bind to a nucleic acid sequence having a NAA PAM sequence.

[0538] The sequence of an exemplary Cas9 A homolog of Spy Cas9 in Streptococcus macacae with native 5′-NAAN-3′ PAM specificity is known in the art and described, for example, by Jakimo et al., (www.biorxiv.org/content/biorxiv/early/2018/09/27/429654.full.pdf), and is in the Sequence Listing as SEQ ID NO: 1307.

[0539] In some embodiments, a variant Cas9 protein harbors H840A, P475A, W476A, N477A, D1125A, W1126A, and D1218A mutations such that the polypeptide has a reduced ability to cleave a target DNA or RNA. In some embodiments, a variant Cas9 protein harbors H840A, P475A, W476A, N477A, D1125A, W1126A, and D1218A mutations relative to SEQ ID NO: 234. Such a Cas9 protein has a reduced ability to cleave a target DNA (e.g., a single stranded target DNA) but retains the ability to bind a target DNA (e.g., a single stranded target DNA). As another non-limiting example, in some embodiments, the variant Cas9 protein harbors D10A, H840A, P475A, W476A, N477A, D1125A, W1126A, and D1218A mutations such that the polypeptide has a reduced ability to cleave a target DNA. Such a Cas9 protein has a reduced ability to cleave a target DNA (e.g., a single stranded target DNA) but retains the ability to bind a target DNA (e.g., a single stranded target DNA). In some embodiments, the variant Cas9 protein harbors D10A, H840A, P475A, W476A, N477A, D1125A, W1126A, and D1218A mutations relative to SEQ ID NO: 234. In some embodiments, when a variant Cas9 protein harbors W476A and W1126A mutations or when the variant Cas9 protein harbors P475A, W476A, N477A, D1125A, W1126A, and D1218A mutations, the variant Cas9 protein does not bind efficiently to a PAM sequence. Thus, in some such cases, when such a variant Cas9 protein is used in a method of binding, the method does not require a PAM sequence. In other words, in some embodiments, when such a variant Cas9 protein is used in a method of binding, the method can include a guide RNA, but the method can be performed in the absence of a PAM sequence (and the specificity of binding is therefore provided by the targeting segment of the guide RNA). Other residues can be mutated to achieve the above effects (i.e., inactivate one or the other nuclease portions). As non-limiting examples, residues D10, G12, G17, E762, H840, N854, N863, H982, H983, A984, D986, and/or A987 can be altered (i.e., substituted). Also, mutations other than alanine substitutions are suitable.

[0540] In some embodiments, a CRISPR protein-derived domain of a base editor can comprise all or a portion of a Cas9 protein with a canonical PAM sequence (NGG). In other embodiments, a Cas9-derived domain of a base editor can employ a non-canonical PAM sequence. Such sequences have been described in the art and would be apparent to the skilled artisan. For example, Cas9 domains that bind non-canonical PAM sequences have been described in Kleinstiver, B. P., et al., “Engineered CRISPR-Cas9 nucleases with altered PAM specificities” Nature 523, 481-485 (2015); and Kleinstiver, B. P., et al., “Broadening the targeting range of Staphylococcus aureus CRISPR-Cas9 by modifying PAM recognition” Nature Biotechnology 33, 1293-1298 (2015); R. T. Walton et al. “Unconstrained genome targeting with near-PAMless engineered CRISPR-Cas9 variants” Science 10.1126/science.aba8853 (2020); Hu et al. “Evolved Cas9 variants with broad PAM compatibility and high DNA specificity,” Nature, 2018 Apr. 5, 556(7699), 57-63; Miller et al., “Continuous evolution of SpCas9 variants compatible with non-G PAMs” Nat. Biotechnol., 2020 April; 38(4):471-481; the entire contents of each are hereby incorporated by reference.

Fusion Proteins Comprising a NapDNAbp and a Cytidine Deaminase and/or Adenosine Deaminase

[0541] Some aspects of the disclosure provide fusion proteins comprising a Cas9 domain or other nucleic acid programmable DNA binding protein (e.g., Cas12) and one or more cytidine deaminase or adenosine deaminase domains. It should be appreciated that the Cas9 domain may be any of the Cas9 domains or Cas9 proteins (e.g., dCas9 or nCas9) provided herein. In some embodiments, any of the Cas9 domains or Cas9 proteins (e.g., dCas9 or nCas9) provided herein may be fused with any of the cytidine deaminases and/or adenosine deaminases provided herein. The domains of the base editors disclosed herein can be arranged in any order.

[0542] In some embodiments, the fusion protein comprises the following domains A-C, A-D, or A-E:

[0543] NH₂-[A-B-C]-COOH;

[0544] NH₂-[A-B-C-D]-COOH; or

[0545] NH₂-[A-B-C-D-E]-COOH;

wherein A and C or A, C, and E, each comprises one or more of the following:

[0546] an adenosine deaminase domain or an active fragment thereof,

[0547] a cytidine deaminase domain or an active fragment thereof, and

[0548] wherein B or B and D, each comprises one or more domains having nucleic acid sequence specific binding activity.

[0549] In some embodiments, the fusion protein comprises the following structure:

[0550] NH₂-[Aₙ-Bₒ-Cₙ]-COOH;

[0551] NH₂-[Aₙ-Bₒ-Cₙ-Dₒ]-COOH; or

[0552] NH₂-[Aₙ-Bₒ-Cₚ-Dₒ-E_{q}]-COOH;

wherein A and C or A, C, and E, each comprises one or more of the following:

[0553] an adenosine deaminase domain or an active fragment thereof,

[0554] a cytidine deaminase domain or an active fragment thereof, and

wherein n is an integer: 1, 2, 3, 4, or 5, wherein p is an integer: 0, 1, 2, 3, 4, or 5; wherein q is an integer 0, 1, 2, 3, 4, or 5; and wherein B or B and D each comprises a domain having nucleic acid sequence specific binding activity; and wherein o is an integer: 1, 2, 3, 4, or 5.

[0555] For example, and without limitation, in some embodiments, the fusion protein comprises the structure:

NH2-[adenosine deaminase]-[Cas9 domain]-COOH;
NH2-[Cas9 domain]-[adenosine deaminase]-COOH;
NH2-[cytidine deaminase]-[Cas9 domain]-COOH;
NH2-[Cas9 domain]-[cytidine deaminase]-COOH;
NH2-[cytidine deaminase]-[Cas9 domain]-[adenosine deaminase]-COOH;
NH2-[adenosine deaminase]-[Cas9 domain]-[cytidine deaminase]-COOH;
NH2-[adenosine deaminase]-[cytidine deaminase]-[Cas9 domain]-COOH;
NH2-[cytidine deaminase]-[adenosine deaminase]-[Cas9 domain]-COOH;
NH2-[Cas9 domain]-[adenosine deaminase]-[cytidine deaminase]-COOH; or
NH2-[Cas9 domain]-[cytidine deaminase]-[adenosine deaminase]-COOH.

[0556] In some embodiments, any of the Cas12 domains or Cas12 proteins provided herein may be fused with any of the cytidine or adenosine deaminases provided herein. For example, and without limitation, in some embodiments, the fusion protein comprises the structure:

NH2-[adenosine deaminase]-[Cas12 domain]-COOH;
NH2-[Cas12 domain]-[adenosine deaminase]-COOH;
NH2-[cytidine deaminase]-[Cas12 domain]-COOH;
NH2-[Cas12 domain]-[cytidine deaminase]-COOH;
NH2-[cytidine deaminase]-[Cas12 domain]-[adenosine deaminase]-COOH;
NH2-[adenosine deaminase]-[Cas12 domain]-[cytidine deaminase]-COOH;
NH2-[adenosine deaminase]-[cytidine deaminase]-[Cas12 domain]-COOH;
NH2-[cytidine deaminase]-[adenosine deaminase]-[Cas12 domain]-COOH;
NH2-[Cas12 domain]-[adenosine deaminase]-[cytidine deaminase]-COOH; or
NH2-[Cas12 domain]-[cytidine deaminase]-[adenosine deaminase]-COOH.

[0557] In some embodiments, the adenosine deaminase is a TadA*8. Exemplary fusion protein structures include the following:

NH2-[TadA*8]-[Cas9 domain]-COOH;
NH2-[Cas9 domain]-[TadA*8]-COOH;
NH2-[TadA*8]-[Cas12 domain]-COOH; or
NH2-[Cas12 domain][TadA*8]-COOH.

[0558] In some embodiments, the adenosine deaminase of the fusion protein comprises a TadA*8 and a cytidine deaminase and/or an adenosine deaminase. In some embodiments, the TadA*8 is TadA*8.1, TadA*8.2, TadA*8.3, TadA*8.4, TadA*8.5, TadA*8.6, TadA*8.7, TadA*8.8, TadA*8.9, TadA*8.10, TadA*8.11, TadA*8.12, TadA*8.13, TadA*8.14, TadA*8.15, TadA*8.16, TadA*8.17, TadA*8.18, TadA*8.19, TadA*8.20, TadA*8.21, TadA*8.22, TadA*8.23, or TadA*8.24.

[0559] Exemplary fusion protein structures include the following:

NH2-[TadA*8]-[Cas9/Cas12]-[adenosine deaminase]-COOH;
NH2-[adenosine deaminase]-[Cas9/Cas12]-[TadA*8]-COOH;
NH2-[TadA*8]-[Cas9/Cas12]-[cytidine deaminase]-COOH; or
NH2-[cytidine deaminase]-[Cas9/Cas12]-[TadA*8]-COOH.

[0560] In some embodiments, the adenosine deaminase of the fusion protein comprises a TadA*9 and a cytidine deaminase and/or an adenosine deaminase. Exemplary fusion protein structures include the following:

NH2-[TadA*9]-[Cas9/Cas12]-[adenosine deaminase]-COOH;
NH2-[adenosine deaminase]-[Cas9/Cas12]-[TadA*9]-COOH;
NH2-[TadA*9]-[Cas9/Cas12]-[cytidine deaminase]-COOH; or
NH2-[cytidine deaminase]-[Cas9/Cas12]-[TadA*9]-COOH.

[0561] In some embodiments, the fusion protein can comprise a deaminase flanked by an N-terminal fragment and a C-terminal fragment of a Cas9 or Cas12 polypeptide. In some embodiments, the fusion protein comprises a cytidine deaminase flanked by an N-terminal fragment and a C-terminal fragment of a Cas9 or Cas12 polypeptide. In some embodiments, the fusion protein comprises an adenosine deaminase flanked by an N-terminal fragment and a C-terminal fragment of a Cas9 or Cas 12 polypeptide.

[0562] In some embodiments, the fusion proteins comprising a cytidine deaminase or adenosine deaminase and a napDNAbp (e.g., Cas9 or Cas12 domain) do not include a linker sequence. In some embodiments, a linker is present between the cytidine or adenosine deaminase and the napDNAbp. In some embodiments, the “-” used in the general architecture above indicates the presence of an optional linker. In some embodiments, cytidine or adenosine deaminase and the napDNAbp are fused via any of the linkers provided herein. For example, in some embodiments the cytidine or adenosine deaminase and the napDNAbp are fused via any of the linkers provided herein.

[0563] It should be appreciated that the fusion proteins of the present disclosure may comprise one or more additional features. For example, in some embodiments, the fusion protein may comprise inhibitors, cytoplasmic localization sequences, export sequences, such as nuclear export sequences, or other localization sequences, as well as sequence tags that are useful for solubilization, purification, or detection of the fusion proteins. Suitable protein tags provided herein include, but are not limited to, biotin carboxylase carrier protein (BCCP) tags, myc-tags, calmodulin-tags, FLAG-tags, hemagglutinin (HA)-tags, polyhistidine tags, also referred to as histidine tags or His-tags, maltose binding protein (MBP)-tags, nus-tags, glutathione-S-transferase (GST)-tags, green fluorescent protein (GFP)-tags, thioredoxin-tags, S-tags, Softags (e.g., Softag 1, Softag 3), strep-tags, biotin ligase tags, FlAsH tags, V5 tags, and SBP-tags. Additional suitable sequences will be apparent to those of skill in the art. In some embodiments, the fusion protein comprises one or more His tags.

[0564] Exemplary, yet nonlimiting, fusion proteins are described in International PCT Application Nos. PCT/2017/044935, PCT/US2019/044935, and PCT/US2020/016288, each of which is incorporated herein by reference for its entirety.

### Fusion Proteins Comprising a Nuclear Localization Sequence (NLS)

[0565] In some embodiments, the fusion proteins provided herein further comprise one or more (e.g., 2, 3, 4, 5) nuclear targeting sequences, for example a nuclear localization sequence (NLS). In one embodiment, a bipartite NLS is used. In some embodiments, a NLS comprises an amino acid sequence that facilitates the importation of a protein, that comprises an NLS, into the cell nucleus (e.g., by nuclear transport). In some embodiments, the NLS is fused to the N-terminus or the C-terminus of the fusion protein. In some embodiments, the NLS is fused to the C-terminus or N-terminus of an nCas9 domain or a dCas9 domain. In some embodiments, the NLS is fused to the N-terminus or C-terminus of the Cas12 domain. In some embodiments, the NLS is fused to the N-terminus or C-terminus of the cytidine or adenosine deaminase. In some embodiments, the NLS is fused to the fusion protein via one or more linkers. In some embodiments, the NLS is fused to the fusion protein without a linker. In some embodiments, the NLS comprises an amino acid sequence of any one of the NLS sequences provided or referenced herein. Additional nuclear localization sequences are known in the art and would be apparent to the skilled artisan. For example, NLS sequences are described in Plank et al., PCT/EP2000/011690, the contents of which are incorporated herein by reference for their disclosure of exemplary nuclear localization sequences. In some embodiments, an NLS comprises the amino acid sequence

(SEQ ID NO: 83)
PKKKRKVEGADKRTADGSEFESPKKKRKV,
(SEQ ID NO: 84)
KRTADGSEFESPKKKRKV,
(SEQ ID NO: 85)
KRPAATKKAGQAKKKK,
(SEQ ID NO: 86)
KKTELQTTNAENKTKKL,
(SEQ ID NO: 87)
KRGINDRNFWRGENGRKTR,
(SEQ ID NO: 1424)
RKSGKIAAIWKRPRKPKKKRKV,
or
(SEQ ID NO: 90)
MDSLLMNRRKFLYQFKNVRWAKGRRETYLC.

[0566] In some embodiments, the fusion proteins comprising a cytidine or adenosine deaminase, a Cas9 domain, and an NLS do not comprise a linker sequence. In some embodiments, linker sequences between one or more of the domains or proteins (e.g., cytidine or adenosine deaminase, Cas9 domain or NLS) are present. In some embodiments, a linker is present between the cytidine deaminase and adenosine deaminase domains and the napDNAbp. In some embodiments, the “-” used in the general architecture below indicates the presence of an optional linker. In some embodiments, the cytidine deaminase and adenosine deaminase and the napDNAbp are fused via any of the linkers provided herein. For example, in some embodiments the cytidine deaminase and adenosine deaminase and the napDNAbp are fused via any of the linkers provided herein.

[0567] In some embodiments, the general architecture of exemplary napDNAbp (e.g., Cas9 or Cas12) fusion proteins with a cytidine or adenosine deaminase and a napDNAbp (e.g., Cas9 or Cas12) domain comprises any one of the following structures, where NLS is a nuclear localization sequence (e.g., any NLS provided herein), NH₂ is the N-terminus of the fusion protein, and COOH is the C-terminus of the fusion protein:

NH₂—NLS-[cytidine deaminase]-[napDNAbp domain]-COOH;
NH₂—NLS [napDNAbp domain]-[cytidine deaminase]-COOH;
NH₂-[cytidine deaminase]-[napDNAbp domain]-NLS-COOH;
NH₂-[napDNAbp domain]-[cytidine deaminase]-NLS-COOH;
NH₂—NLS-[adenosine deaminase]-[napDNAbp domain]-COOH;
NH₂—NLS [napDNAbp domain]-[adenosine deaminase]-COOH;
NH₂-[adenosine deaminase]-[napDNAbp domain]-NLS-COOH;
NH₂-[napDNAbp domain]-[adenosine deaminase]-NLS-COOH;
NH₂—NLS-[cytidine deaminase]-[napDNAbp domain]-[adenosine deaminase]-COOH;
NH₂—NLS-[adenosine deaminase]-[napDNAbp domain]-[cytidine deaminase]-COOH;
NH₂—NLS-[adenosine deaminase]-[cytidine deaminase]-[napDNAbp domain]-COOH;
NH₂—NLS-[cytidine deaminase]-[adenosine deaminase]-[napDNAbp domain]-COOH;
NH₂—NLS-[napDNAbp domain]-[adenosine deaminase]-[cytidine deaminase]-COOH;
NH₂—NLS-[napDNAbp domain]-[cytidine deaminase]-[adenosine deaminase]-COOH;
NH₂-[cytidine deaminase]-[napDNAbp domain]-[adenosine deaminase]-NLS-COOH;
NH₂-[adenosine deaminase]-[napDNAbp domain]-[cytidine deaminase]-NLS-COOH;
NH₂-[adenosine deaminase]-[cytidine deaminase]-[napDNAbp domain]-NLS-COOH;
NH₂-[cytidine deaminase]-[adenosine deaminase]-[napDNAbp domain]-NLS-COOH;
NH₂-[napDNAbp domain]-[adenosine deaminase]-[cytidine deaminase]-NLS-COOH; or

[0568] NH₂-[napDNAbp domain]-[cytidine deaminase]-[adenosine deaminase]-NLS-COOH. In some embodiments, the NLS is present in a linker or the NLS is flanked by linkers, for example described herein. A bipartite NLS comprises two basic amino acid clusters, which are separated by a relatively short spacer sequence (hence bipartite—2 parts, while monopartite NLSs are not). The NLS of nucleoplasmin, KR[PAATKKAGQA]KKKK (SEQ ID NO: 85), is the prototype of the ubiquitous bipartite signal: two clusters of basic amino acids, separated by a spacer of about 10 amino acids. The sequence of an exemplary bipartite NLS follows:

(SEQ ID NO: 83)
PKKKRKVEGADKRTADGSEFESPKKKRKV

[0569] A vector that encodes a CRISPR enzyme comprising one or more nuclear localization sequences (NLSs) can be used. For example, there can be or be about 1, 2, 3, 4, 5, 6, 7, 8, 9, 10 NLSs used. A CRISPR enzyme can comprise the NLSs at or near the amino-terminus, about or more than about 1, 2, 3, 4, 5, 6, 7, 8, 9, 10 NLSs at or near the carboxy-terminus, or any combination thereof (e.g., one or more NLS at the amino-terminus and one or more NLS at the carboxy terminus). When more than one NLS is present, each can be selected independently of others, such that a single NLS can be present in more than one copy and/or in combination with one or more other NLSs present in one or more copies.

[0570] CRISPR enzymes used in the methods can comprise about 6 NLSs. An NLS is considered near the N- or C-terminus when the nearest amino acid to the NLS is within about 50 amino acids along a polypeptide chain from the N- or C-terminus, e.g., within 1, 2, 3, 4, 5, 10, 15, 20, 25, 30, 40, or 50 amino acids.

### Additional Domains

[0571] A base editor described herein can include any domain which helps to facilitate the nucleobase editing, modification or altering of a nucleobase of a polynucleotide. In some embodiments, a base editor comprises a polynucleotide programmable nucleotide binding domain (e.g., Cas9), a nucleobase editing domain (e.g., deaminase domain), and one or more additional domains. In some embodiments, the additional domain can facilitate enzymatic or catalytic functions of the base editor, binding functions of the base editor, or be inhibitors of cellular machinery (e.g., enzymes) that could interfere with the desired base editing result. In some embodiments, a base editor can comprise a nuclease, a nickase, a recombinase, a deaminase, a methyltransferase, a methylase, an acetylase, an acetyltransferase, a transcriptional activator, or a transcriptional repressor domain.

[0572] In some embodiments, a base editor can comprise an uracil glycosylase inhibitor (UGI) domain. In some embodiments, cellular DNA repair response to the presence of U: G heteroduplex DNA can be responsible for a decrease in nucleobase editing efficiency in cells. In such embodiments, uracil DNA glycosylase (UDG) can catalyze removal of U from DNA in cells, which can initiate base excision repair (BER), mostly resulting in reversion of the U:G pair to a C:G pair. In such embodiments, BER can be inhibited in base editors comprising one or more domains that bind the single strand, block the edited base, inhibit UGI, inhibit BER, protect the edited base, and/or promote repairing of the non-edited strand. Thus, this disclosure contemplates a base editor fusion protein comprising a UGI domain.

[0573] In some embodiments, a base editor comprises as a domain all or a portion of a double-strand break (DSB) binding protein. For example, a DSB binding protein can include a Gam protein of bacteriophage Mu that can bind to the ends of DSBs and can protect them from degradation. See Komor, A. C., et al., “Improved base excision repair inhibition and bacteriophage Mu Gam protein yields C:G-to-T:A base editors with higher efficiency and product purity” Science Advances 3:eaao4774 (2017), the entire content of which is hereby incorporated by reference.

[0574] Additionally, in some embodiments, a Gam protein can be fused to an N terminus of a base editor. In some embodiments, a Gam protein can be fused to a C terminus of a base editor. The Gam protein of bacteriophage Mu can bind to the ends of double strand breaks (DSBs) and protect them from degradation. In some embodiments, using Gam to bind the free ends of DSB can reduce indel formation during the process of base editing. In some embodiments, 174-residue Gam protein is fused to the N terminus of the base editors. See Komor, A. C., et al., “Improved base excision repair inhibition and bacteriophage Mu Gam protein yields C:G-to-T:A base editors with higher efficiency and product purity” Science Advances 3:eaao4774 (2017). In some embodiments, a mutation or mutations can change the length of a base editor domain relative to a wild type domain. For example, a deletion of at least one amino acid in at least one domain can reduce the length of the base editor. In another case, a mutation or mutations do not change the length of a domain relative to a wild type domain. For example, substitutions in any domain does not change the length of the base editor.

[0575] Non-limiting examples of such base editors, where the length of all the domains is the same as the wild type domains, can include:

NH2-[nucleobase editing domain]-Linker1-[APOBEC1]-Linker2-[nucleobase editing domain]-COOH;
NH2-[nucleobase editing domain]-Linker1-[APOBEC1]-[nucleobase editing domain]-COOH;
NH2-[nucleobase editing domain]-[APOBEC1]-Linker2-[nucleobase editing domain]-COOH;
NH2-[nucleobase editing domain]-[APOBEC1]-[nucleobase editing domain]-COOH;
NH2-[nucleobase editing domain]-Linker1-[APOBEC1]-Linker2-[nucleobase editing domain]-[UGI]-COOH;
NH2-[nucleobase editing domain]-Linker1-[APOBEC1]-[nucleobase editing domain]-[UGI]-COOH;
NH2-[nucleobase editing domain]-[APOBEC1]-Linker2-[nucleobase editing domain]-[UGI]-COOH;
NH2-[nucleobase editing domain]-[APOBEC1]-[nucleobase editing domain]-[UGI]-COOH;
NH2-[UGI]-[nucleobase editing domain]-Linker1-[APOBEC1]-Linker2-[nucleobase editing domain]-COOH;
NH2-[UGI]-[nucleobase editing domain]-Linker1-[APOBEC1]-[nucleobase editing domain]-COOH;
NH2-[UGI]-[nucleobase editing domain]-[APOBEC1]-Linker2-[nucleobase editing domain]-COOH; or
NH2-[UGI]-[nucleobase editing domain]-[APOBEC1]-[nucleobase editing domain]-COOH.

### F. BASE EDITOR SYSTEM

[0576] Provided herein are systems, compositions, and methods for editing a nucleobase using a base editor system. In some embodiments, the base editor system comprises (1) a base editor (BE) comprising a polynucleotide programmable nucleotide binding domain and a nucleobase editing domain (e.g., a deaminase domain) for editing the nucleobase; and (2) a guide polynucleotide (e.g., guide RNA) in conjunction with the polynucleotide programmable nucleotide binding domain. In some embodiments, the base editor system is a cytidine base editor (CBE) or an adenosine base editor (ABE). In some embodiments, the polynucleotide programmable nucleotide binding domain is a polynucleotide programmable DNA or RNA binding domain. In some embodiments, the nucleobase editing domain is a deaminase domain. In some embodiments, a deaminase domain can be a cytidine deaminase or an cytosine deaminase. In some embodiments, a deaminase domain can be an adenine deaminase or an adenosine deaminase. In some embodiments, the adenosine base editor can deaminate adenine in DNA. In some embodiments, the base editor is capable of deaminating a cytidine in DNA.

[0577] In some embodiments, a base editing system as provided herein provides a new approach to genome editing that uses a fusion protein containing a catalytically defective Streptococcus pyogenes Cas9, a deaminase (e.g., cytidine or adenosine deaminase), and an inhibitor of base excision repair to induce programmable, single nucleotide (C→T or A→G) changes in DNA without generating double-strand DNA breaks, without requiring a donor DNA template, and without inducing an excess of stochastic insertions and deletions.

[0578] Details of nucleobase editing proteins are described in International PCT Application Nos. PCT/2017/045381 (WO2018/027078) and PCT/US2016/058344 (WO2017/070632), each of which is incorporated herein by reference for its entirety. Also see Komor, A. C., et al., “Programmable editing of a target base in genomic DNA without double-stranded DNA cleavage” Nature 533, 420-424 (2016); Gaudelli, N. M., et al., “Programmable base editing of A•T to G•C in genomic DNA without DNA cleavage” Nature 551, 464-471 (2017); and Komor, A. C., et al., “Improved base excision repair inhibition and bacteriophage Mu Gam protein yields C:G-to-T:A base editors with higher efficiency and product purity” Science Advances 3:eaao4774 (2017), the entire contents of which are hereby incorporated by reference.

[0579] Use of the base editor system provided herein comprises the steps of: (a) contacting a target nucleotide sequence of a polynucleotide (e.g., double- or single stranded DNA or RNA) of a subject with a base editor system comprising a nucleobase editor (e.g., an adenosine base editor or a cytidine base editor) and a guide polynucleic acid (e.g., gRNA), wherein the target nucleotide sequence comprises a targeted nucleobase pair; (b) inducing strand separation of said target region; (c) converting a first nucleobase of said target nucleobase pair in a single strand of the target region to a second nucleobase; and (d) cutting no more than one strand of said target region, where a third nucleobase complementary to the first nucleobase base is replaced by a fourth nucleobase complementary to the second nucleobase. It should be appreciated that in some embodiments, step (b) is omitted. In some embodiments, said targeted nucleobase pair is a plurality of nucleobase pairs in one or more genes. In some embodiments, the base editor system provided herein is capable of multiplex editing of a plurality of nucleobase pairs in one or more genes. In some embodiments, the plurality of nucleobase pairs is located in the same gene. In some embodiments, the plurality of nucleobase pairs is located in one or more genes, wherein at least one gene is located in a different locus.

[0580] In some embodiments, the cut single strand (nicked strand) is hybridized to the guide nucleic acid. In some embodiments, the cut single strand is opposite to the strand comprising the first nucleobase. In some embodiments, the base editor comprises a Cas9 domain. In some embodiments, the first base is adenine, and the second base is not a G, C, A, or T. In some embodiments, the second base is inosine.

[0581] In some embodiments, a single guide polynucleotide may be utilized to target a deaminase to a target nucleic acid sequence. In some embodiments, a single pair of guide polynucleotides may be utilized to target different deaminases to a target nucleic acid sequence.

[0582] The nucleobase components and the polynucleotide programmable nucleotide binding component of a base editor system may be associated with each other covalently or non-covalently. For example, in some embodiments, the deaminase domain can be targeted to a target nucleotide sequence by a polynucleotide programmable nucleotide binding domain. In some embodiments, a polynucleotide programmable nucleotide binding domain can be fused or linked to a deaminase domain. In some embodiments, a polynucleotide programmable nucleotide binding domain can target a deaminase domain to a target nucleotide sequence by non-covalently interacting with or associating with the deaminase domain. For example, in some embodiments, the nucleobase editing component, e.g., the deaminase component can comprise an additional heterologous portion or domain that is capable of interacting with, associating with, or capable of forming a complex with an additional heterologous portion or domain that is part of a polynucleotide programmable nucleotide binding domain. In some embodiments, the additional heterologous portion may be capable of binding to, interacting with, associating with, or forming a complex with a polypeptide. In some embodiments, the additional heterologous portion may be capable of binding to, interacting with, associating with, or forming a complex with a polynucleotide. In some embodiments, the additional heterologous portion may be capable of binding to a guide polynucleotide. In some embodiments, the additional heterologous portion may be capable of binding to a polypeptide linker. In some embodiments, the additional heterologous portion may be capable of binding to a polynucleotide linker. The additional heterologous portion may be a protein domain. In some embodiments, the additional heterologous portion may be a K Homology (KH) domain, a MS2 coat protein domain, a PP7 coat protein domain, a SfMu Corn coat protein domain, a steril alpha motif, a telomerase Ku binding motif and Ku protein, a telomerase Sm7 binding motif and Sm7 protein, or an RNA recognition motif.

[0583] A base editor system may further comprise a guide polynucleotide component. It should be appreciated that components of the base editor system may be associated with each other via covalent bonds, noncovalent interactions, or any combination of associations and interactions thereof. In some embodiments, a deaminase domain can be targeted to a target nucleotide sequence by a guide polynucleotide. For example, in some embodiments, the nucleobase editing component of the base editor system, e.g., the deaminase component, can comprise an additional heterologous portion or domain (e.g., polynucleotide binding domain such as an RNA or DNA binding protein) that is capable of interacting with, associating with, or capable of forming a complex with a portion or segment (e.g., a polynucleotide motif) of a guide polynucleotide. In some embodiments, the additional heterologous portion or domain (e.g., polynucleotide binding domain such as an RNA or DNA binding protein) can be fused or linked to the deaminase domain. In some embodiments, the additional heterologous portion may be capable of binding to, interacting with, associating with, or forming a complex with a polypeptide. In some embodiments, the additional heterologous portion may be capable of binding to, interacting with, associating with, or forming a complex with a polynucleotide. In some embodiments, the additional heterologous portion may be capable of binding to a guide polynucleotide. In some embodiments, the additional heterologous portion may be capable of binding to a polypeptide linker. In some embodiments, the additional heterologous portion may be capable of binding to a polynucleotide linker. The additional heterologous portion may be a protein domain. In some embodiments, the additional heterologous portion may be a K Homology (KH) domain, a MS2 coat protein domain, a PP7 coat protein domain, a SfMu Corn coat protein domain, a sterile alpha motif, a telomerase Ku binding motif and Ku protein, a telomerase Sm7 binding motif and Sm7 protein, or an RNA recognition motif.

[0584] In some embodiments, a base editor system can further comprise an inhibitor of base excision repair (BER) component. It should be appreciated that components of the base editor system may be associated with each other via covalent bonds, noncovalent interactions, or any combination of associations and interactions thereof. The inhibitor of BER component may comprise a base excision repair inhibitor. In some embodiments, the inhibitor of base excision repair can be a uracil DNA glycosylase inhibitor (UGI). In some embodiments, the inhibitor of base excision repair can be an inosine base excision repair inhibitor. In some embodiments, the inhibitor of base excision repair can be targeted to the target nucleotide sequence by the polynucleotide programmable nucleotide binding domain. In some embodiments, a polynucleotide programmable nucleotide binding domain can be fused or linked to an inhibitor of base excision repair. In some embodiments, a polynucleotide programmable nucleotide binding domain can be fused or linked to a deaminase domain and an inhibitor of base excision repair. In some embodiments, a polynucleotide programmable nucleotide binding domain can target an inhibitor of base excision repair to a target nucleotide sequence by non-covalently interacting with or associating with the inhibitor of base excision repair. For example, in some embodiments, the inhibitor of base excision repair component can comprise an additional heterologous portion or domain that is capable of interacting with, associating with, or capable of forming a complex with an additional heterologous portion or domain that is part of a polynucleotide programmable nucleotide binding domain. In some embodiments, the inhibitor of base excision repair can be targeted to the target nucleotide sequence by the guide polynucleotide. For example, in some embodiments, the inhibitor of base excision repair can comprise an additional heterologous portion or domain (e.g., polynucleotide binding domain such as an RNA or DNA binding protein) that is capable of interacting with, associating with, or capable of forming a complex with a portion or segment (e.g., a polynucleotide motif) of a guide polynucleotide. In some embodiments, the additional heterologous portion or domain of the guide polynucleotide (e.g., polynucleotide binding domain such as an RNA or DNA binding protein) can be fused or linked to the inhibitor of base excision repair. In some embodiments, the additional heterologous portion may be capable of binding to, interacting with, associating with, or forming a complex with a polynucleotide. In some embodiments, the additional heterologous portion may be capable of binding to a guide polynucleotide. In some embodiments, the additional heterologous portion may be capable of binding to a polypeptide linker. In some embodiments, the additional heterologous portion may be capable of binding to a polynucleotide linker. The additional heterologous portion may be a protein domain. In some embodiments, the additional heterologous portion may be a K Homology (KH) domain, a MS2 coat protein domain, a PP7 coat protein domain, a SfMu Corn coat protein domain, a sterile alpha motif, a telomerase Ku binding motif and Ku protein, a telomerase Sm7 binding motif and Sm7 protein, or an RNA recognition motif.

[0585] In some embodiments, the base editor inhibits base excision repair (BER) of the edited strand. In some embodiments, the base editor protects or binds the non-edited strand. In some embodiments, the base editor comprises UGI activity. In some embodiments, the base editor comprises a catalytically inactive inosine-specific nuclease. In some embodiments, the base editor comprises nickase activity. In some embodiments, the intended edit of base pair is upstream of a PAM site. In some embodiments, the intended edit of base pair is 1, 2, 3, 4, 5, 6, 7, 8, 9, 10, 11, 12, 13, 14, 15, 16, 17, 18, 19, or 20 nucleotides upstream of the PAM site. In some embodiments, the intended edit of base-pair is downstream of a PAM site. In some embodiments, the intended edited base pair is 1, 2, 3, 4, 5, 6, 7, 8, 9, 10, 11, 12, 13, 14, 15, 16, 17, 18, 19, or 20 nucleotides downstream stream of the PAM site.

[0586] In some embodiments, the method does not require a canonical (e.g., NGG) PAM site. In some embodiments, the nucleobase editor comprises a linker or a spacer. In some embodiments, the linker or spacer is 1-25 amino acids in length. In some embodiments, the linker or spacer is 5-20 amino acids in length. In some embodiments, the linker or spacer is 10, 11, 12, 13, 14, 15, 16, 17, 18, 19, or 20 amino acids in length.

[0587] In some embodiments, the base editing fusion proteins provided herein need to be positioned at a precise location, for example, where a target base is placed within a defined region (e.g., a “deamination window”). In some embodiments, a target can be within a 4 base region. In some embodiments, such a defined target region can be approximately 15 bases upstream of the PAM. See Komor, A. C., et al., “Programmable editing of a target base in genomic DNA without double-stranded DNA cleavage” Nature 533, 420-424 (2016); Gaudelli, N. M., et al., “Programmable base editing of A•T to G•C in genomic DNA without DNA cleavage” Nature 551, 464-471 (2017); and Komor, A. C., et al., “Improved base excision repair inhibition and bacteriophage Mu Gam protein yields C:G-to-T:A base editors with higher efficiency and product purity” Science Advances 3:eaao4774 (2017), the entire contents of which are hereby incorporated by reference.

[0588] In some embodiments, the target region comprises a target window, wherein the target window comprises the target nucleobase pair. In some embodiments, the target window comprises 1-10 nucleotides. In some embodiments, the target window is 1, 2, 3, 4, 5, 6, 7, 8, 9, 10, 11, 12, 13, 14, 15, 16, 17, 18, 19, or 20 nucleotides in length. In some embodiments, the intended edit of base pair is within the target window. In some embodiments, the target window comprises the intended edit of base pair. In some embodiments, the method is performed using any of the base editors provided herein. In some embodiments, a target window is a deamination window. A deamination window can be the defined region in which a base editor acts upon and deaminates a target nucleotide. In some embodiments, the deamination window is within a 2, 3, 4, 5, 6, 7, 8, 9, or 10 base regions. In some embodiments, the deamination window is 5, 6, 7, 8, 9, 10, 11, 12, 13, 14, 15, 16, 17, 18, 19, 20, 21, 22, 23, 24, or 25 bases upstream of the PAM.

[0589] The base editors of the present disclosure can comprise any domain, feature or amino acid sequence which facilitates the editing of a target polynucleotide sequence. For example, in some embodiments, the base editor comprises a nuclear localization sequence (NLS). In some embodiments, an NLS of the base editor is localized between a deaminase domain and a polynucleotide programmable nucleotide binding domain. In some embodiments, an NLS of the base editor is localized C-terminal to a polynucleotide programmable nucleotide binding domain.

[0590] Other exemplary features that can be present in a base editor as disclosed herein are localization sequences, such as cytoplasmic localization sequences, export sequences, such as nuclear export sequences, or other localization sequences, as well as sequence tags that are useful for solubilization, purification, or detection of the fusion proteins. Suitable protein tags provided herein include, but are not limited to, biotin carboxylase carrier protein (BCCP) tags, myc-tags, calmodulin-tags, FLAG-tags, hemagglutinin (HA)-tags, polyhistidine tags, also referred to as histidine tags or His-tags, maltose binding protein (MBP)-tags, nus-tags, glutathione-S-transferase (GST)-tags, green fluorescent protein (GFP)-tags, thioredoxin-tags, S-tags, Softags (e.g., Softag 1, Softag 3), strep-tags, biotin ligase tags, FlAsH tags, V5 tags, and SBP-tags. Additional suitable sequences will be apparent to those of skill in the art. In some embodiments, the fusion protein comprises one or more His tags.

[0591] In some embodiments, non-limiting exemplary cytidine base editors (CBE) include BE1 (APOBEC1-XTEN-dCas9), BE2 (APOBEC1-XTEN-dCas9-UGI), BE3 (APOBEC1-XTEN-dCas9(A840H)-UGI), BE3-Gam, saBE3, saBE4-Gam, BE4, BE4-Gam, saBE4, or saB4E-Gam. BE4 extends the APOBEC1-Cas9n(D10A) linker to 32 amino acids and the Cas9n-UGI linker to 9 amino acids, and appends a second copy of UGI to the C-terminus of the construct with another 9-amino acid linker into a single base editor construct. The base editors saBE3 and saBE4 have the S. pyogenes Cas9n(D10A) replaced with the smaller S. aureus Cas9n(D10A). BE3-Gam, saBE3-Gam, BE4-Gam, and saBE4-Gam have 174 residues of Gam protein fused to the N-terminus of BE3, saBE3, BE4, and saBE4 via the 16 amino acid XTEN linker.

[0592] In some embodiments, the adenosine base editor (ABE) can deaminate adenine in DNA. In some embodiments, ABE is generated by replacing APOBEC1 component of BE3 with natural or engineered E. coli TadA, human ADAR2, mouse ADA, or human ADAT2. In some embodiments, ABE comprises evolved TadA variant. In some embodiments, the ABE is ABE 1.2 (TadA*-XTEN-nCas9-NLS). In some embodiments, TadA* comprises A106V and D108N mutations.

[0593] In some embodiments, the ABE is a second-generation ABE. In some embodiments, the ABE is ABE2.1, which comprises additional mutations D147Y and E155V in TadA* (TadA*2.1). In some embodiments, the ABE is ABE2.2, ABE2.1 fused to catalytically inactivated version of human alkyl adenine DNA glycosylase (AAG with E125Q mutation). In some embodiments, the ABE is ABE2.3, ABE2.1 fused to catalytically inactivated version of E. coli Endo V (inactivated with D35A mutation). In some embodiments, the ABE is ABE2.6 which has a linker twice as long (32 amino acids, (SGGS)₂ (SEQ ID NO: 1425)-XTEN-(SGGS)₂ (“(SGGS)₂” disclosed as SEQ ID NO: 1425)) as the linker in ABE2.1. In some embodiments, the ABE is ABE2.7, which is ABE2.1 tethered with an additional wild-type TadA monomer. In some embodiments, the ABE is ABE2.8, which is ABE2.1 tethered with an additional TadA*2.1 monomer. In some embodiments, the ABE is ABE2.9, which is a direct fusion of evolved TadA (TadA*2.1) to the N-terminus of ABE2.1. In some embodiments, the ABE is ABE2.10, which is a direct fusion of wild-type TadA to the N-terminus of ABE2.1. In some embodiments, the ABE is ABE2.11, which is ABE2.9 with an inactivating E59A mutation at the N-terminus of TadA* monomer. In some embodiments, the ABE is ABE2.12, which is ABE2.9 with an inactivating E59A mutation in the internal TadA* monomer.

[0594] In some embodiments, the ABE is a third generation ABE. In some embodiments, the ABE is ABE3.1, which is ABE2.3 with three additional TadA mutations (L84F, H123Y, and I156F).

[0595] In some embodiments, the ABE is a fourth generation ABE. In some embodiments, the ABE is ABE4.3, which is ABE3.1 with an additional TadA mutation A142N (TadA*4.3).

[0596] In some embodiments, the ABE is a fifth generation ABE. In some embodiments, the ABE is ABE5.1, which is generated by importing a consensus set of mutations from surviving clones (H36L, R51L, S146C, and K157N) into ABE3.1. In some embodiments, the ABE is ABE5.3, which has a heterodimeric construct containing wild-type E. coli TadA fused to an internal evolved TadA*. In some embodiments, the ABE is ABE5.2, ABE5.4, ABE5.5, ABE5.6, ABE5.7, ABE5.8, ABE5.9, ABE5.10, ABE5.11, ABE5.12, ABE5.13, or ABE5.14, as shown in Table 10 below. In some embodiments, the ABE is a sixth generation ABE. In some embodiments, the ABE is ABE6.1, ABE6.2, ABE6.3, ABE6.4, ABE6.5, or ABE6.6, as shown in Table 10 below. In some embodiments, the ABE is a seventh generation ABE. In some embodiments, the ABE is ABE7.1, ABE7.2, ABE7.3, ABE7.4, ABE7.5, ABE7.6, ABE7.7, ABE7.8, ABE 7.9, or ABE7.10, as shown in Table 10 below.

TABLE 10
Genotypes of ABEs

| | 26 | 23 | 26 | 36 | 37 | 48 | 49 | 51 | 72 | 84 | 87 | 106 | 108 | 123 | 125 | 142 | 146 | 147 | 152 | 155 | 156 | 157 | 161 |
|---|---|---|---|---|---|---|---|---|---|---|---|---|---|---|---|---|---|---|---|---|---|---|---|
| ABE0.1 | R | W | R | H | N | P | | R | N | L | S | A | D | H | G | A | S | D | R | E | I | K | K |
| ABE0.2 | R | W | R | H | N | P | | R | N | L | S | A | D | H | G | A | S | D | R | E | I | K | K |
| ABE1.1 | R | W | R | H | N | P | | R | N | L | S | A | N | H | G | A | S | D | R | E | I | K | K |
| ABE1.2 | R | W | R | H | N | P | | R | N | L | S | V | N | H | G | A | S | D | R | E | I | K | K |
| ABE2.1 | R | W | R | H | N | P | | R | N | L | S | V | N | H | G | A | S | Y | R | V | I | K | K |
| ABE2.2 | R | W | R | H | N | P | | R | N | L | S | V | N | H | G | A | S | Y | R | V | I | K | K |
| ABE2.3 | R | W | R | H | N | P | | R | N | L | S | V | N | H | G | A | S | Y | R | V | I | K | K |
| ABE2.4 | R | W | R | H | N | P | | R | N | L | S | V | N | H | G | A | S | Y | R | V | I | K | K |
| ABE2.5 | R | W | R | H | N | P | | R | N | L | S | V | N | H | G | A | S | Y | R | V | I | K | K |
| ABE2.6 | R | W | R | H | N | P | | R | N | L | S | V | N | H | G | A | S | Y | R | V | I | K | K |
| ABE2.7 | R | W | R | H | N | P | | R | N | L | S | V | N | H | G | A | S | Y | R | V | I | K | K |
| ABE2.8 | R | W | R | H | N | P | | R | N | L | S | V | N | H | G | A | S | Y | R | V | I | K | K |
| ABE2.9 | R | W | R | H | N | P | | R | N | L | S | V | N | H | G | A | S | Y | R | V | I | K | K |
| ABE2.10 | R | W | R | H | N | P | | R | N | L | S | V | N | H | G | A | S | Y | R | V | I | K | K |
| ABE2.11 | R | W | R | H | N | P | | R | N | L | S | V | N | H | G | A | S | Y | R | V | I | K | K |
| ABE2.12 | R | W | R | H | N | P | | R | N | L | S | V | N | H | G | A | S | Y | R | V | I | K | K |
| ABE3.1 | R | W | R | H | N | P | | R | N | F | S | V | N | Y | G | A | S | Y | R | V | F | K | K |
| ABE3.2 | R | W | R | H | N | P | | R | N | F | S | V | N | Y | G | A | S | Y | R | V | F | K | K |
| ABE3.3 | R | W | R | H | N | P | | R | N | F | S | V | N | Y | G | A | S | Y | R | V | F | K | K |
| ABE3.4 | R | W | R | H | N | P | | R | N | F | S | V | N | Y | G | A | S | Y | R | V | F | K | K |
| ABE3.5 | R | W | R | H | N | P | | R | N | F | S | V | N | Y | G | A | S | Y | R | V | F | K | K |
| ABE3.6 | R | W | R | H | N | P | | R | N | F | S | V | N | Y | G | A | S | Y | R | V | F | K | K |
| ABE3.7 | R | W | R | H | N | P | | R | N | F | S | V | N | Y | G | A | S | Y | R | V | F | K | K |
| ABE3.8 | R | W | R | H | N | P | | R | N | F | S | V | N | Y | G | A | S | Y | R | V | F | K | K |
| ABE4.1 | R | W | R | H | N | P | | R | N | L | S | V | N | H | G | N | S | Y | R | V | I | K | K |
| ABE4.2 | G | W | G | H | N | P | | R | N | L | S | V | N | H | G | N | S | Y | R | V | I | K | K |
| ABE4.3 | R | W | R | H | N | P | | R | N | F | S | V | N | Y | G | N | S | Y | R | V | F | K | K |
| ABE5.1 | R | W | R | L | N | P | | L | N | F | S | V | N | Y | G | A | C | Y | R | V | F | N | K |
| ABE5.2 | R | W | R | H | S | P | | R | N | F | S | V | N | Y | G | A | S | Y | R | V | F | K | T |
| ABE5.3 | R | W | R | L | N | P | | L | N | I | S | V | N | Y | G | A | C | Y | R | V | F | N | K |
| ABE5.4 | R | W | R | H | S | P | | R | N | F | S | V | N | Y | G | A | S | Y | R | V | F | K | T |
| ABE5.5 | R | W | R | L | N | P | | L | N | F | S | V | N | Y | G | A | C | Y | R | V | F | N | K |
| ABE5.6 | R | W | R | L | N | P | | L | N | F | S | V | N | Y | G | A | C | Y | R | V | F | N | K |
| ABE5.7 | R | W | R | L | N | P | | L | N | F | S | V | N | Y | G | A | C | Y | R | V | F | N | K |
| ABE5.8 | R | W | R | L | N | P | | L | N | F | S | V | N | Y | G | A | C | Y | R | V | F | N | K |
| ABE5.9 | R | W | R | L | N | P | | L | N | F | S | V | N | Y | G | A | C | Y | R | V | F | N | K |
| ABE5.10 | R | W | R | L | N | P | | L | N | F | S | V | N | Y | G | A | C | Y | R | V | F | N | K |
| ABE5.11 | R | W | R | L | N | P | | L | N | F | S | V | N | Y | G | A | C | Y | R | V | F | N | K |
| ABE5.12 | R | W | R | L | N | P | | L | N | F | S | V | N | Y | G | A | C | Y | R | V | F | N | K |
| ABE5.13 | R | W | R | H | N | P | | L | D | F | S | V | N | Y | A | A | S | Y | R | V | F | K | K |
| ABE5.14 | R | W | R | H | N | S | | L | N | F | C | V | N | Y | G | A | S | Y | R | V | F | K | K |
| ABE6.1 | R | W | R | H | N | S | | L | N | F | S | V | N | Y | G | N | S | Y | R | V | F | K | K |
| ABE6.2 | R | W | R | H | N | T | V | L | N | F | S | V | N | Y | G | N | S | Y | R | V | F | N | K |
| ABE6.3 | R | W | R | L | N | S | | L | N | F | S | V | N | Y | G | A | C | Y | R | V | F | N | K |
| ABE6.4 | R | W | R | L | N | S | | L | N | F | S | V | N | Y | G | N | C | Y | R | V | F | N | K |
| ABE6.5 | R | W | R | L | N | T | V | L | N | F | S | V | N | Y | G | A | C | Y | R | V | F | N | K |
| ABE6.6 | R | W | R | L | N | T | V | L | N | F | S | V | N | Y | G | N | C | Y | R | V | F | N | K |
| ABE7.1 | R | W | R | L | N | A | | L | N | F | S | V | N | Y | G | A | C | Y | R | V | F | N | K |
| ABE7.2 | R | W | R | L | N | A | | L | N | F | S | V | N | Y | G | N | C | Y | R | V | F | N | K |
| ABE7.3 | R | L | R | L | N | A | | L | N | F | S | V | N | Y | G | A | C | Y | R | V | F | N | K |
| ABE7.4 | R | R | R | L | N | A | | L | N | F | S | V | N | Y | G | A | C | Y | R | V | F | N | K |
| ABE7.5 | R | W | R | L | N | A | | L | N | F | S | V | N | Y | G | A | C | Y | H | V | F | N | K |
| ABE7.6 | R | W | R | L | N | A | | L | N | I | S | V | N | Y | G | A | C | Y | P | V | F | N | K |
| ABE7.7 | R | L | R | L | N | A | | L | N | F | S | V | N | Y | G | A | C | Y | P | V | F | N | K |
| ABE7.8 | R | L | R | L | N | A | | L | N | F | S | V | N | Y | G | N | C | Y | R | V | F | N | K |
| ABE7.9 | R | L | R | L | N | A | | L | N | F | S | V | N | Y | G | N | C | Y | P | V | F | N | K |
| ABE7.10 | R | R | R | L | N | A | | L | N | F | S | V | N | Y | G | A | C | Y | P | V | F | N | K |

[0597] In some embodiments, the base editor is an eighth generation ABE (ABE8). In some embodiments, the ABE8 contains a TadA*8 variant. In some embodiments, the ABE8 has a monomeric construct containing a TadA*8 variant (“ABE8.x-m”). In some embodiments, the ABE8 is ABE8.1-m, which has a monomeric construct containing TadA*7.10 with a Y147T mutation (TadA*8.1). In some embodiments, the ABE8 is ABE8.2-m, which has a monomeric construct containing TadA*7.10 with a Y147R mutation (TadA*8.2). In some embodiments, the ABE8 is ABE8.3-m, which has a monomeric construct containing TadA*7.10 with a Q154S mutation (TadA*8.3). In some embodiments, the ABE8 is ABE8.4-m, which has a monomeric construct containing TadA*7.10 with a Y123H mutation (TadA*8.4). In some embodiments, the ABE8 is ABE8.5-m, which has a monomeric construct containing TadA*7.10 with a V82S mutation (TadA*8.5). In some embodiments, the ABE8 is ABE8.6-m, which has a monomeric construct containing TadA*7.10 with a T166R mutation (TadA*8.6). In some embodiments, the ABE8 is ABE8.7-m, which has a monomeric construct containing TadA*7.10 with a Q154R mutation (TadA*8.7). In some embodiments, the ABE8 is ABE8.8-m, which has a monomeric construct containing TadA*7.10 with Y147R, Q154R, and Y123H mutations (TadA*8.8). In some embodiments, the ABE8 is ABE8.9-m, which has a monomeric construct containing TadA*7.10 with Y147R, Q154R and I76Y mutations (TadA*8.9). In some embodiments, the ABE8 is ABE8.10-m, which has a monomeric construct containing TadA*7.10 with Y147R, Q154R, and T166R mutations (TadA*8.10). In some embodiments, the ABE8 is ABE8.11-m, which has a monomeric construct containing TadA*7.10 with Y147T and Q154R mutations (TadA*8.11). In some embodiments, the ABE8 is ABE8.12-m, which has a monomeric construct containing TadA*7.10 with Y147T and Q154S mutations (TadA*8.12).

[0598] In some embodiments, the ABE8 is ABE8.13-m, which has a monomeric construct containing TadA*7.10 with Y123H (Y123H reverted from H123Y), Y147R, Q154R and I76Y mutations (TadA*8.13). In some embodiments, the ABE8 is ABE8.14-m, which has a monomeric construct containing TadA*7.10 with I76Y and V82S mutations (TadA*8.14). In some embodiments, the ABE8 is ABE8.15-m, which has a monomeric construct containing TadA*7.10 with V82S and Y147R mutations (TadA*8.15). In some embodiments, the ABE8 is ABE8.16-m, which has a monomeric construct containing TadA*7.10 with V82S, Y123H (Y123H reverted from H123Y) and Y147R mutations (TadA*8.16). In some embodiments, the ABE8 is ABE8.17-m, which has a monomeric construct containing TadA*7.10 with V82S and Q154R mutations (TadA*8.17). In some embodiments, the ABE8 is ABE8.18-m, which has a monomeric construct containing TadA*7.10 with V82S, Y123H (Y123H reverted from H123Y) and Q154R mutations (TadA*8.18). In some embodiments, the ABE8 is ABE8.19-m, which has a monomeric construct containing TadA*7.10 with V82S, Y123H (Y123H reverted from H123Y), Y147R and Q154R mutations (TadA*8.19). In some embodiments, the ABE8 is ABE8.20-m, which has a monomeric construct containing TadA*7.10 with I76Y, V82S, Y123H (Y123H reverted from H123Y), Y147R and Q154R mutations (TadA*8.20). In some embodiments, the ABE8 is ABE8.21-m, which has a monomeric construct containing TadA*7.10 with Y147R and Q154S mutations (TadA*8.21). In some embodiments, the ABE8 is ABE8.22-m, which has a monomeric construct containing TadA*7.10 with V82S and Q154S mutations (TadA*8.22). In some embodiments, the ABE8 is ABE8.23-m, which has a monomeric construct containing TadA*7.10 with V82S and Y123H (Y123H reverted from H123Y) mutations (TadA*8.23). In some embodiments, the ABE8 is ABE8.24-m, which has a monomeric construct containing TadA*7.10 with V82S, Y123H (Y123H reverted from H123Y), and Y147T mutations (TadA*8.24).

[0599] In some embodiments, the ABE8 has a heterodimeric construct containing wild-type E. coli TadA fused to a TadA*8 variant (“ABE8.x-d”). In some embodiments, the ABE8 is ABE8.1-d, which has a heterodimeric construct containing wild-type E. coli TadA fused to TadA*7.10 with a Y147T mutation (TadA*8.1). In some embodiments, the ABE8 is ABE8.2-d, which has a heterodimeric construct containing wild-type E. coli TadA fused to TadA*7.10 with a Y147R mutation (TadA*8.2). In some embodiments, the ABE8 is ABE8.3-d, which has a heterodimeric construct containing wild-type E. coli TadA fused to TadA*7.10 with a Q154S mutation (TadA*8.3). In some embodiments, the ABE8 is ABE8.4-d, which has a heterodimeric construct containing wild-type E. coli TadA fused to TadA*7.10 with a Y123H mutation (TadA*8.4). In some embodiments, the ABE8 is ABE8.5-d, which has a heterodimeric construct containing wild-type E. coli TadA fused to TadA*7.10 with a V82S mutation (TadA*8.5). In some embodiments, the ABE8 is ABE8.6-d, which has a heterodimeric construct containing wild-type E. coli TadA fused to TadA*7.10 with a T166R mutation (TadA*8.6). In some embodiments, the ABE8 is ABE8.7-d, which has a heterodimeric construct containing wild-type E. coli TadA fused to TadA*7.10 with a Q154R mutation (TadA*8.7). In some embodiments, the ABE8 is ABE8.8-d, which has a heterodimeric construct containing wild-type E. coli TadA fused to TadA*7.10 with Y147R, Q154R, and Y123H mutations (TadA*8.8). In some embodiments, the ABE8 is ABE8.9-d, which has a heterodimeric construct containing wild-type E. coli TadA fused to TadA*7.10 with Y147R, Q154R and I76Y mutations (TadA*8.9). In some embodiments, the ABE8 is ABE8.10-d, which has a heterodimeric construct containing wild-type E. coli TadA fused to TadA*7.10 with Y147R, Q154R, and T166R mutations (TadA*8.10). In some embodiments, the ABE8 is ABE8.11-d, which has a heterodimeric construct containing wild-type E. coli TadA fused to TadA*7.10 with Y147T and Q154R mutations (TadA*8.11). In some embodiments, the ABE8 is ABE8.12-d, which has heterodimeric construct containing wild-type E. coli TadA fused to TadA*7.10 with Y147T and Q154S mutations (TadA*8.12). In some embodiments, the ABE8 is ABE8.13-d, which has a heterodimeric construct containing wild-type E. coli TadA fused to TadA*7.10 with Y123H (Y123H reverted from H123Y), Y147R, Q154R and I76Y mutations (TadA*8.13). In some embodiments, the ABE8 is ABE8.14-d, which has a heterodimeric construct containing wild-type E. coli TadA fused to TadA*7.10 with I76Y and V82S mutations (TadA*8.14). In some embodiments, the ABE8 is ABE8.15-d, which has a heterodimeric construct containing wild-type E. coli TadA fused to TadA*7.10 with V82S and Y147R mutations (TadA*8.15). In some embodiments, the ABE8 is ABE8.16-d, which has a heterodimeric construct containing wild-type E. coli TadA fused to TadA*7.10 with V82S, Y123H (Y123H reverted from H123Y) and Y147R mutations (TadA*8.16). In some embodiments, the ABE8 is ABE8.17-d, which has a heterodimeric construct containing wild-type E. coli TadA fused to TadA*7.10 with V82S and Q154R mutations (TadA*8.17). In some embodiments, the ABE8 is ABE8.18-d, which has a heterodimeric construct containing wild-type E. coli TadA fused to TadA*7.10 with V82S, Y123H (Y123H reverted from H123Y) and Q154R mutations (TadA*8.18). In some embodiments, the ABE8 is ABE8.19-d, which has a heterodimeric construct containing wild-type E. coli TadA fused to TadA*7.10 with V82S, Y123H (Y123H reverted from H123Y), Y147R and Q154R mutations (TadA*8.19). In some embodiments, the ABE8 is ABE8.20-d, which has a heterodimeric construct containing wild-type E. coli TadA fused to TadA*7.10 with I76Y, V82S, Y123H (Y123H reverted from H123Y), Y147R and Q154R mutations (TadA*8.20). In some embodiments, the ABE8 is ABE8.21-d, which has a heterodimeric construct containing wild-type E. coli TadA fused to TadA*7.10 with Y147R and Q154S mutations (TadA*8.21). In some embodiments, the ABE8 is ABE8.22-d, which has a heterodimeric construct containing wild-type E. coli TadA fused to TadA*7.10 with V82S and Q154S mutations (TadA*8.22). In some embodiments, the ABE8 is ABE8.23-d, which has a heterodimeric construct containing wild-type E. coli TadA fused to TadA*7.10 with V82S and Y123H (Y123H reverted from H123Y) mutations (TadA*8.23). In some embodiments, the ABE8 is ABE8.24-d, which has a heterodimeric construct containing wild-type E. coli TadA fused to TadA*7.10 with V82S, Y123H (Y123H reverted from H123Y), and Y147T mutations (TadA*8.24).

[0600] In some embodiments, the ABE8 has a heterodimeric construct containing TadA*7.10 fused to a TadA*8 variant (“ABE8.x-7”). In some embodiments, the ABE8 is ABE8.1-7, which has a heterodimeric construct containing TadA*7.10 fused to TadA*7.10 with a Y147T mutation (TadA*8.1). In some embodiments, the ABE8 is ABE8.2-7, which has a heterodimeric construct containing TadA*7.10 fused to TadA*7.10 with a Y147R mutation (TadA*8.2). In some embodiments, the ABE8 is ABE8.3-7, which has a heterodimeric construct containing TadA*7.10 fused to TadA*7.10 with a Q154S mutation (TadA*8.3). In some embodiments, the ABE8 is ABE8.4-7, which has a heterodimeric construct containing TadA*7.10 fused to TadA*7.10 with a Y123H mutation (TadA*8.4). In some embodiments, the ABE8 is ABE8.5-7, which has a heterodimeric construct containing TadA*7.10 fused to TadA*7.10 with a V82S mutation (TadA*8.5). In some embodiments, the ABE8 is ABE8.6-7, which has a heterodimeric construct containing TadA*7.10 fused to TadA*7.10 with a T166R mutation (TadA*8.6). In some embodiments, the ABE8 is ABE8.7-7, which has a heterodimeric construct containing TadA*7.10 fused to TadA*7.10 with a Q154R mutation (TadA*8.7). In some embodiments, the ABE8 is ABE8.8-7, which has a heterodimeric construct containing TadA*7.10 fused to TadA*7.10 with Y147R, Q154R, and Y123H mutations (TadA*8.8). In some embodiments, the ABE8 is ABE8.9-7, which has a heterodimeric construct containing TadA*7.10 fused to TadA*7.10 with Y147R, Q154R and I76Y mutations (TadA*8.9). In some embodiments, the ABE8 is ABE8.10-7, which has a heterodimeric construct containing TadA*7.10 fused to TadA*7.10 with Y147R, Q154R, and T166R mutations (TadA*8.10). In some embodiments, the ABE8 is ABE8.11-7, which has a heterodimeric construct containing TadA*7.10 fused to TadA*7.10 with Y147T and Q154R mutations (TadA*8.11). In some embodiments, the ABE8 is ABE8.12-7, which has a heterodimeric construct containing TadA*7.10 fused to TadA*7.10 with Y147T and Q154S mutations (TadA*8.12). In some embodiments, the ABE8 is ABE8.13-7, which has a heterodimeric construct containing TadA*7.10 fused to TadA*7.10 with Y123H (Y123H reverted from H123Y), Y147R, Q154R and I76Y mutations (TadA*8.13). In some embodiments, the ABE8 is ABE8.14-7, which has a heterodimeric construct containing TadA*7.10 fused to TadA*7.10 with I76Y and V82S mutations (TadA*8.14). In some embodiments, the ABE8 is ABE8.15-7, which has a heterodimeric construct containing TadA*7.10 fused to TadA*7.10 with V82S and Y147R mutations (TadA*8.15). In some embodiments, the ABE8 is ABE8.16-7, which has a heterodimeric construct containing TadA*7.10 fused to TadA*7.10 with V82S, Y123H (Y123H reverted from H123Y) and Y147R mutations (TadA*8.16). In some embodiments, the ABE8 is ABE8.17-7, which has a heterodimeric construct containing TadA*7.10 fused to TadA*7.10 with V82S and Q154R mutations (TadA*8.17). In some embodiments, the ABE8 is ABE8.18-7, which has a heterodimeric construct containing TadA*7.10 fused to TadA*7.10 with V82S, Y123H (Y123H reverted from H123Y) and Q154R mutations (TadA*8.18). In some embodiments, the ABE8 is ABE8.19-7, which has a heterodimeric construct containing TadA*7.10 fused to TadA*7.10 with V82S, Y123H (Y123H reverted from H123Y), Y147R and Q154R mutations (TadA*8.19). In some embodiments, the ABE8 is ABE8.20-7, which has a heterodimeric construct containing TadA*7.10 fused to TadA*7.10 with I76Y, V82S, Y123H (Y123H reverted from H123Y), Y147R and Q154R mutations (TadA*8.20). In some embodiments, the ABE8 is ABE8.21-7, which has a heterodimeric construct containing TadA*7.10 fused to TadA*7.10 with Y147R and Q154S mutations (TadA*8.21). In some embodiments, the ABE8 is ABE8.22-7, which has a heterodimeric construct containing TadA*7.10 fused to TadA*7.10 with V82S and Q154S mutations (TadA*8.22). In some embodiments, the ABE8 is ABE8.23-7, which has a heterodimeric construct containing TadA*7.10 fused to TadA*7.10 with V82S and Y123H (Y123H reverted from H123Y) mutations (TadA*8.23). In some embodiments, the ABE8 is ABE8.24-7, which has a heterodimeric construct containing TadA*7.10 fused to TadA*7.10 with V82S, Y123H (Y123H reverted from H123Y), and Y147T mutations (TadA*8.24).

[0601] In some embodiments, the ABE is ABE8.1-m, ABE8.2-m, ABE8.3-m, ABE8.4-m, ABE8.5-m, ABE8.6-m, ABE8.7-m, ABE8.8-m, ABE8.9-m, ABE8.10-m, ABE8.11-m, ABE8.12-m, ABE8.13-m, ABE8.14-m, ABE8.15-m, ABE8.16-m, ABE8.17-m, ABE8.18-m, ABE8.19-m, ABE8.20-m, ABE8.21-m, ABE8.22-m, ABE8.23-m, ABE8.24-m, ABE8.1-d, ABE8.2-d, ABE8.3-d, ABE8.4-d, ABE8.5-d, ABE8.6-d, ABE8.7-d, ABE8.8-d, ABE8.9-d, ABE8.10-d, ABE8.11-d, ABE8.12-d, ABE8.13-d, ABE8.14-d, ABE8.15-d, ABE8.16-d, ABE8.17-d, ABE8.18-d, ABE8.19-d, ABE8.20-d, ABE8.21-d, ABE8.22-d, ABE8.23-d, or ABE8.24-d as shown in Table 11 below.

TABLE 11
Adenosine Deaminase Base Editor 8 (ABE8) Variants

| | Adenosine | |
|---|---|---|
| ABE8 | Deaminase | Adenosine Deaminase Description |
| ABE8.1-m | TadA*8.1 | Monomer_TadA*7.10 + Y147T |
| ABE8.2-m | TadA*8.2 | Monomer_TadA*7.10 + Y147R |
| ABE8.3-m | TadA*8.3 | Monomer_TadA*7.10 + Q154S |
| ABE8.4-m | TadA*8.4 | Monomer_TadA*7.10 + Y123H |
| ABE8.5-m | TadA*8.5 | Monomer_TadA*7.10 + V82S |
| ABE8.6-m | TadA*8.6 | Monomer_TadA*7.10 + T166R |
| ABE8.7-m | TadA*8.7 | Monomer_TadA*7.10 + Q154R |
| ABE8.8-m | TadA*8.8 | Monomer_TadA*7.10 + Y147R_Q154R_Y123H |
| ABE8.9-m | TadA*8.9 | Monomer_TadA*7.10 + Y147R_Q154R_I76Y |
| ABE8.10-m | TadA*8.10 | Monomer_TadA*7.10 + Y147R_Q154R_T166R |
| ABE8.11-m | TadA*8.11 | Monomer_TadA*7.10 + Y147T_Q154R |
| ABE8.12-m | TadA*8.12 | Monomer_TadA*7.10 + Y147T_Q154S |
| ABE8.13-m | TadA*8.13 | Monomer_TadA*7.10 + Y123H_Y147R_Q154R_I76Y |
| ABE8.14-m | TadA*8.14 | Monomer_TadA*7.10 + I76Y_V82S |
| ABE8.15-m | TadA*8.15 | Monomer_TadA*7.10 + V82S_Y147R |
| ABE8.16-m | TadA*8.16 | Monomer_TadA*7.10 + V82S_Y123H_Y147R |
| ABE8.17-m | TadA*8.17 | Monomer_TadA*7.10 + V82S_Q154R |
| ABE8.18-m | TadA*8.18 | Monomer_TadA*7.10 + V82S_Y123H_Q154R |
| ABE8.19-m | TadA*8.19 | Monomer_TadA*7.10 + V82S_Y123H_Y147R_Q154R |
| ABE8.20-m | TadA*8.20 | Monomer TadA*7.10 + |
| | | I76Y_V82S_Y123H_Y147R_Q154R |
| ABE8.21-m | TadA*8.21 | Monomer_TadA*7.10 + Y147R_Q154S |
| ABE8.22-m | TadA*8.22 | Monomer_TadA*7.10 + V82S_Q154S |
| ABE8.23-m | TadA*8.23 | Monomer_TadA*7.10 + V82S_Y123H |
| ABE8.24-m | TadA*8.24 | Monomer_TadA*7.10 + V82S_Y123H_Y147T |
| ABE8.1-d | TadA*8.1 | Heterodimer_(WT) + (TadA*7.10 + Y147T) |
| ABE8.2-d | TadA*8.2 | Heterodimer_(WT) + (TadA*7.10 + Y147R) |
| ABE8.3-d | TadA*8.3 | Heterodimer_(WT) + (TadA*7.10 + Q154S) |
| ABE8.4-d | TadA*8.4 | Heterodimer_(WT) + (TadA*7.10 + Y123H) |
| ABE8.5-d | TadA*8.5 | Heterodimer_(WT) + (TadA*7.10 + V82S) |
| ABE8.6-d | TadA*8.6 | Heterodimer_(WT) + (TadA*7.10 + T166R) |
| ABE8.7-d | TadA*8.7 | Heterodimer_(WT) + (TadA*7.10 + Q154R) |
| ABE8.8-d | TadA*8.8 | Heterodimer_(WT) + (TadA*7.10 + |
| | | Y147R_Q154R_Y123H) |
| ABE8.9-d | TadA*8.9 | Heterodimer_(WT) + (TadA*7.10 + |
| | | Y147R_Q154R_I76Y) |
| ABE8.10-d | TadA*8.10 | Heterodimer_(WT) + (TadA*7.10 + |
| | | Y147R_Q154R_T166R) |
| ABE8.11-d | TadA*8.11 | Heterodimer_(WT) + (TadA*7.10 + Y147T_Q154R) |
| ABE8.12-d | TadA*8.12 | Heterodimer_(WT) + (TadA*7.10 + Y147T_Q154S) |
| ABE8.13-d | TadA*8.13 | Heterodimer_(WT) + (TadA*7.10 + |
| | | Y123H_Y147T_Q154R_I76Y) |
| ABE8.14-d | TadA*8.14 | Heterodimer_(WT) + (TadA*7.10 + I76Y_V82S) |
| ABE8.15-d | TadA*8.15 | Heterodimer_(WT) + (TadA*7.10 + V82S_ Y147R) |
| ABE8.16-d | TadA*8.16 | Heterodimer_(WT) + (TadA*7.10 + |
| | | V82S_Y123H_Y147R) |
| ABE8.17-d | TadA*8.17 | Heterodimer_(WT) + (TadA*7.10 + V82S_Q154R) |
| ABE8.18-d | TadA*8.18 | Heterodimer_(WT) + (TadA*7.10 + |
| | | V82S_Y123H_Q154R) |
| ABE8.19-d | TadA*8.19 | Heterodimer_(WT) + (TadA*7.10 + |
| | | V82S_Y123H_Y147R_Q154R) |
| ABE8.20-d | TadA*8.20 | Heterodimer_(WT) + (TadA*7.10 + |
| | | I76Y_V82S_Y123H_Y147R_Q154R) |
| ABE8.21-d | TadA*8.21 | Heterodimer_(WT) + (TadA*7.10 + Y147R_Q154S) |
| ABE8.22-d | TadA*8.22 | Heterodimer_(WT) + (TadA*7.10 + V82S_Q154S) |
| ABE8.23-d | TadA*8.23 | Heterodimer_(WT) + (TadA*7.10 + V82S_Y123H) |
| ABE8.24-d | TadA*8.24 | Heterodimer_(WT) + (TadA*7.10 + |
| | | V82S_Y123H_Y147T) |

[0602] In some embodiments, the ABE8 is ABE8a-m, which has a monomeric construct containing TadA*7.10 with R26C, A109S, T111R, D119N, H122N, Y147D, F149Y, T166I, and D167N mutations (TadA*8a). In some embodiments, the ABE8 is ABE8b-m, which has a monomeric construct containing TadA*7.10 with V88A, A109S, T111R, D119N, H122N, F149Y, T166I, and D167N mutations (TadA*8b). In some embodiments, the ABE8 is ABE8c-m, which has a monomeric construct containing TadA*7.10 with R26C, A109S, T111R, D119N, H122N, F149Y, T166I, and D167N mutations (TadA*8c). In some embodiments, the ABE8 is ABE8d-m, which has a monomeric construct containing TadA*7.10 with V88A, T111R, D119N, and F149Y mutations (TadA*8d). In some embodiments, the ABE8 is ABE8e-m, which has a monomeric construct containing TadA*7.10 with A109S, T111R, D119N, H122N, Y147D, F149Y, T166I, and D167N mutations (TadA*8e).

[0603] In some embodiments, the ABE8 is ABE8a-d, which has a heterodimeric construct containing wild-type E. coli TadA fused to TadA*7.10 with R26C, A109S, T111R, D119, H122N, Y147D, F149Y, T166I, and D167N mutations (TadA*8a). In some embodiments, the ABE8 is ABE8b-d, which has a heterodimeric construct containing wild-type E. coli TadA fused to TadA*7.10 with V88A, A109S, T111R, D119N, H122N, F149Y, T166I, and D167N mutations (TadA*8b). In some embodiments, the ABE8 is ABE8c-d, which has a heterodimeric construct containing wild-type E. coli TadA fused to TadA*7.10 with R26C, A109S, T111R, D119N, H122N, F149Y, T166I, and D167N mutations (TadA*8c). In some embodiments, the ABE8 is ABE8d-d, which has a heterodimeric construct containing wild-type E. coli TadA fused to TadA*7.10 with V88A, T111R, D119N, and F149Y mutations (TadA*8d). In some embodiments, the ABE8 is ABE8e-d, which has a heterodimeric construct containing wild-type E. coli TadA fused to TadA*7.10 with A109S, T111R, D119N, H122N, Y147D, F149Y, T166I, and D167N mutations (TadA*8e).

[0604] In some embodiments, the ABE8 is ABE8a-7, which has a heterodimeric construct containing TadA*7.10 fused to TadA*7.10 with R26C, A109S, T111R, D119, H122N, Y147D, F149Y, T166I, and D167N mutations (TadA*8a). In some embodiments, the ABE8 is ABE8b-7, which has a heterodimeric construct containing TadA*7.10 fused to TadA*7.10 with V88A, A109S, T111R, D119N, H122N, F149Y, T166I, and D167N mutations (TadA*8b). In some embodiments, the ABE8 is ABE8c-7, which has a heterodimeric construct containing TadA*7.10 fused to TadA*7.10 with R26C, A109S, T111R, D119N, H122N, F149Y, T166I, and D167N mutations (TadA*8c). In some embodiments, the ABE8 is ABE8d-7, which has a heterodimeric construct containing TadA*7.10 fused to TadA*7.10 with V88A, T111R, D119N, and F149Y mutations (TadA*8d). In some embodiments, the ABE8 is ABE8e-7, which has a heterodimeric construct containing TadA*7.10 fused to TadA*7.10 with A109S, T111R, D119N, H122N, Y147D, F149Y, T166I, and D167N mutations (TadA*8e).

In some embodiments, the ABE is ABE8a-m, ABE8b-m, ABE8c-m, ABE8d-m, ABE8e-m, ABE8a-d, ABE8b-d, ABE8c-d, ABE8d-d, or ABE8e-d, as shown in Table 12 below. In some embodiments, the ABE is ABE8e-m or ABE8e-d. ABE8e shows efficient adenine base editing activity and low indel formation when used with Cas homologues other than SpCas9, for example, SaCas9, SaCas9-KKH, Cas12a homologues, e.g., LbCas12a, enAs-Cas12a, SpCas9-NG and circularly permuted CP1028-SpCas9 and CP1041-SpCas9. In addition to the mutations shown for ABE8e in Table 12, off-target RNA and DNA editing were reduced by introducing a V106W substitution into the TadA domain (as described in M. Richter et al., 2020, Nature Biotechnology, doi.org/10.1038/s41587-020-0453-z, the entire contents of which are incorporated by reference herein).

TABLE 12
Additional Adenosine Deaminase Base Editor 8 Variants. In the table, “monomer”
indicates an ABE comprising a single TadA*7.10 comprising the indicated alterations
and “heterodimer” indicates an ABE comprising a TadA*7.10 comprising the
indicated alterations fused to an E. coli TadA adenosine deaminase.

| ABE8 Base | Adenosine | |
|---|---|---|
| Editor | Deaminase | Adenosine Deaminase Description |
| ABE8a-m | TadA*8a | Monomer_TadA*7.10 + R26C + A109S + T111R + D119N + |
| | | H122N + Y147D + F149Y + T166I + D167N |
| ABE8b-m | TadA*8b | Monomer_TadA*7.10 + V88A + A109S + T111R + D119N + |
| | | H122N + F149Y + T166I + D167N |
| ABE8c-m | TadA*8c | Monomer_TadA*7.10 + R26C + A109S + T111R + D119N + |
| | | H122N + F149Y + T166I + D167N |
| ABE8d-m | TadA*8d | Monomer_TadA*7.10 + V88A + T111R + D119N + F149Y |
| ABE8e-m | TadA*8e | Monomer_TadA*7.10 + A109S + T111R + D119N + H122N + |
| | | Y147D + F149Y + T166I + D167N |
| ABE8a-d | TadA*8a | Heterodimer_(WT) + (TadA*7.10 + R26C + A109S + T111R + |
| | | D119N + H122N + Y147D + F149Y + T166I + D167N) |
| ABE8b-d | TadA*8b | Heterodimer_(WT) + (TadA*7.10 + V88A + A109S + T111R + |
| | | D119N + H122N + F149Y + T166I + D167N) |
| ABE8c-d | TadA*8c | Heterodimer_(WT) + (TadA*7.10 + R26C + A109S + T111R + |
| | | D119N + H122N + F149Y + T166I + D167N) |
| ABE8d-d | TadA*8d | Heterodimer_(WT) + (TadA*7.10 + V88A + T111R + D119N + |
| | | F149Y) |
| ABE8e-d | TadA*8e | Heterodimer_(WT) + (TadA*7.10 + A109S + T111R + D119N + |
| | | H122N + Y147D + F149Y + T166I + D167N) |

[0605] In some embodiments, base editors (e.g., ABE8) are generated by cloning an adenosine deaminase variant (e.g., TadA*8) into a scaffold that includes a circular permutant Cas9 (e.g., CP5 or CP6) and a bipartite nuclear localization sequence. In some embodiments, the base editor (e.g., ABE7.9, ABE7.10, or ABE8) is an NGC PAM CP5 variant (S. pyogenes Cas9 or spVRQR Cas9). In some embodiments, the base editor (e.g., ABE7.9, ABE7.10, or ABE8) is an AGA PAM CP5 variant (S. pyogenes Cas9 or spVRQR Cas9). In some embodiments, the base editor (e.g., ABE7.9, ABE7.10, or ABE8) is an NGC PAM CP6 variant (S. pyogenes Cas9 or spVRQR Cas9). In some embodiments, the base editor (e.g. ABE7.9, ABE7.10, or ABE8) is an AGA PAM CP6 variant (S. pyogenes Cas9 or spVRQR Cas9).

[0606] In some embodiments, the ABE has a genotype as shown in Table 13 below.

TABLE 13
Genotypes of ABEs

| | 23 | 26 | 36 | 37 | 48 | 49 | 51 | 72 | 84 | 87 | 105 | 108 | 123 | 125 | 142 | 145 | 147 | 152 | 155 | 156 | 157 | 161 |
|---|---|---|---|---|---|---|---|---|---|---|---|---|---|---|---|---|---|---|---|---|---|---|
| ABE7.9 | L | R | L | N | A | | L | N | F | S | V | N | Y | G | N | C | Y | P | V | F | N | K |
| ABE7.10 | R | R | L | N | A | | L | N | F | S | V | N | Y | G | A | C | Y | P | V | F | N | K |

As shown in Table 14 below, genotypes of 40 ABE8s are described. Residue positions in the evolved E. coli TadA portion of ABE are indicated. Mutational changes in ABE8 are shown when distinct from ABE7.10 mutations. In some embodiments, the ABE has a genotype of one of the ABEs as shown in Table 14 below.

Residue Identity in Evolved TadA

| | 23 | 36 | 48 | 51 | 76 | 82 | 84 | 106 | 108 | 123 | 146 | 147 | 152 | 154 | 155 | 156 | 157 | 166 |
|---|---|---|---|---|---|---|---|---|---|---|---|---|---|---|---|---|---|---|
| ABE7.10 | R | L | A | L | I | V | F | V | N | Y | C | Y | P | Q | V | F | N | T |
| ABE8.1-m | | | | | | | | | | | | T | | | | | | |
| ABE8.2-m | | | | | | | | | | | | R | | | | | | |
| ABE8.3-m | | | | | | | | | | | | | | S | | | | |
| ABE8.4-m | | | | | | | | | | H | | | | | | | | |
| ABE8.5-m | | | | | | S | | | | | | | | | | | | |
| ABE8.6-m | | | | | | | | | | | | | | | | | | R |
| ABE8.7-m | | | | | | | | | | | | | | R | | | | |
| ABE8.8-m | | | | | | | | | | H | | R | | R | | | | |
| ABE8.9-m | | | | | Y | | | | | | | R | | R | | | | |
| ABE8.10- | | | | | | | | | | | | R | | R | | | | R |
| m | | | | | | | | | | | | | | | | | | |
| ABE8.11- | | | | | | | | | | | | T | | R | | | | |
| m | | | | | | | | | | | | | | | | | | |
| ABE8.12- | | | | | | | | | | | | T | | S | | | | |
| m | | | | | | | | | | | | | | | | | | |
| ABE8.13- | | | | | Y | | | | | H | | R | | R | | | | |
| m | | | | | | | | | | | | | | | | | | |
| ABE8.14- | | | | | Y | S | | | | | | | | | | | | |
| m | | | | | | | | | | | | | | | | | | |
| ABE8.15- | | | | | | S | | | | | | R | | | | | | |
| m | | | | | | | | | | | | | | | | | | |
| ABE8.16- | | | | | | S | | | | H | | R | | | | | | |
| m | | | | | | | | | | | | | | | | | | |
| ABE8.17- | | | | | | S | | | | | | | | R | | | | |
| m | | | | | | | | | | | | | | | | | | |
| ABE8.18- | | | | | | S | | | | H | | | | R | | | | |
| m | | | | | | | | | | | | | | | | | | |
| ABE8.19- | | | | | | S | | | | H | | R | | R | | | | |
| m | | | | | | | | | | | | | | | | | | |
| ABE8.20- | | | | | Y | S | | | | H | | R | | R | | | | |
| m | | | | | | | | | | | | | | | | | | |
| ABE8.21- | | | | | | | | | | | | R | | S | | | | |
| m | | | | | | | | | | | | | | | | | | |
| ABE8.22- | | | | | | S | | | | | | | | S | | | | |
| m | | | | | | | | | | | | | | | | | | |
| ABE8.23- | | | | | | S | | | | H | | | | | | | | |
| m | | | | | | | | | | | | | | | | | | |
| ABE8.24- | | | | | | S | | | | H | | T | | | | | | |
| m | | | | | | | | | | | | | | | | | | |
| ABE8.1-d | | | | | | | | | | | | T | | | | | | |
| ABE8.2-d | | | | | | | | | | | | R | | | | | | |
| ABE8.3-d | | | | | | | | | | | | | | S | | | | |
| ABE8.4-d | | | | | | | | | | H | | | | | | | | |
| ABE8.5-d | | | | | | S | | | | | | | | | | | | |
| ABE8.6-d | | | | | | | | | | | | | | | | | | R |
| ABE8.7-d | | | | | | | | | | | | | | R | | | | |
| ABE8.8-d | | | | | | | | | | H | | R | | R | | | | |
| ABE8.9-d | | | | | Y | | | | | | | R | | R | | | | |
| ABE8.10-d | | | | | | | | | | | | R | | R | | | | R |
| ABE8.11-d | | | | | | | | | | | | T | | R | | | | |
| ABE8.12-d | | | | | | | | | | | | T | | S | | | | |
| ABE8.13-d | | | | | Y | | | | | H | | R | | R | | | | |
| ABE8.14-d | | | | | Y | S | | | | | | | | | | | | |
| ABE8.15-d | | | | | | S | | | | | | R | | | | | | |
| ABE8.16-d | | | | | | S | | | | H | | R | | | | | | |
| ABE8.17-d | | | | | | S | | | | | | | | R | | | | |
| ABE8.18-d | | | | | | S | | | | H | | | | R | | | | |
| ABE8.19-d | | | | | | S | | | | H | | R | | R | | | | |
| ABE8.20-d | | | | | Y | S | | | | H | | R | | R | | | | |
| ABE8.21d | | | | | | | | | | | | R | | S | | | | |
| ABE8.22-d | | | | | | S | | | | | | | | S | | | | |
| ABE8.23-d | | | | | | S | | | | H | | | | | | | | |
| ABE8.24-d | | | | | | S | | | | H | | T | | | | | | |

[0607] In some embodiments, the base editor is ABE8.1, which comprises or consists essentially of the following sequence or a fragment thereof having adenosine deaminase activity:

ABE8.1_Y147T_CP5_NGC PAM_monomer
(SEQ ID NO: 1426)
MSEVEFSHEYWMRHALTLAKRARDEREVPVGAVLV
LNNRVIGEGWNRAIGLHDPTAHAEIMALRQGGLVM
QNYRLIDATLYVTFEPCVMCAGAMIHSRIGRVVFG
VRNAKTGAAGSLMDVLHYPGMNHRVEITEGILADE
CAALLCTFFRMPRQVFNAQKKAQSSTD

[symbol]

[symbol]

EIGKATAKYFFY
SNIMNFFKTEITLANGEIRKRPLIETNGETGEIVW
DKGRDFATVRKVLSMPQVNIVKKTEVQTGGFSKES
ILPKRNSDKLIARKKDWDPKKYGGFMQPTVAYSVL
VVAKVEKGKSKKLKSVKELLGITIMERSSFEKNPI
DFLEAKGYKEVKKDLIIKLPKYSLFELENGRKRML
ASAKFLQKGNELALPSKYVNFLYLASHYEKLKGSP
EDNEQKQLFVEQHKHYLDEIIEQISEFSKRVILAD
ANLDKVLSAYNKHRDKPIREQAENIIHLFTLTNLG
APRAFKYFDTTIARKEYRSTKEVLDATLIHQSITG
LYETRIDLSQLGGD [symbol] [symbol]
DKKYSIGLAIGTNSVGWAVITDEYKVPSKKFKVLG
NTDRHSIKKNLIGALLFDSGETAEATRLKRTARRR
YTRRKNRICYLQEIFSNEMAKVDDSFFHRLEESFL
VEEDKKHERHPIFGNIVDEVAYHEKYPTIYHLRKK
LVDSTDKADLRLIYLALAHMIKFRGHFLIEGDLNP
DNSDVDKLFIQLVQTYNQLFEENPINASGVDAKAI
LSARLSKSRRLENLIAQLPGEKKNGLFGNLIALSL
GLTPNFKSNFDLAEDAKLQLSKDTYDDDLDNLLAQ
IGDQYADLFLAAKNLSDAILLSDILRVNTEITKAP
LSASMIKRYDEHHQDLTLLKALVRQQLPEKYKEIF
FDQSKNGYAGYIDGGASQEEFYKFIKPILEKMDGT
EELLVKLNREDLLRKQRTFDNGSIPHQIHLGELHA
ILRRQEDFYPFLKDNREKIEKILTFRIPYYVGPLA
RGNSRFAWMTRKSEETITPWNFEEVVDKGASAQSF
IERMTNFDKNLPNEKVLPKHSLLYEYFTVYNELTK
VKYVTEGMRKPAFLSGEQKKAIVDLLFKTNRKVTV
KQLKEDYFKKIECFDSVEISGVEDRFNASLGTYHD
LLKIIKDKDFLDNEENEDILEDIVLTLTLFEDREM
IEERLKTYAHLFDDKVMKQLKRRRYTGWGRLSRKL
INGIRDKQSGKTILDFLKSDGFANRNFMQLIHDDS
LTFKEDIQKAQVSGQGDSLHEHIANLAGSPAIKKG
ILQTVKVVDELVKVMGRHKPENIVIEMARENQTTQ
KGQKNSRERMKRIEEGIKELGSQILKEHPVENTQL
QNEKLYLYYLQNGRDMYVDQELDINRLSDYDVDHI
VPQSFLKDDSIDNKVLTRSDKNRGKSDNVPSEEVV
KKMKNYWRQLLNAKLITQRKFDNLTKAERGGLSEL
DKAGFIKRQLVETRQITKHVAQILDSRMNTKYDEN
DKLIREVKVITLKSKLVSDFRKDFQFYKVREINNY
HHAHDAYLNAVVGTALIKKYPKLESEFVYGDYKVY
DVRKMIAKSEQEGADKRTADGSEFESPKKKRKV

[0608] In the above sequence, the plain text denotes an adenosine deaminase sequence, bold sequence indicates sequence derived from Cas9, the italicized sequence denotes a linker sequence, and the underlined sequence denotes a bipartite nuclear localization sequence. Other ABE8 sequences are provided in the attached sequence listing (SEQ ID NOs: 1427-1449).

[0609] In some embodiments, the base editor is a ninth generation ABE (ABE9). In some embodiments, the ABE9 contains a TadA*9 variant. ABE9 base editors include an adenosine deaminase variant comprising an amino acid sequence, which contains alterations relative to an ABE 7*10 reference sequence, as described herein. Exemplary ABE9 variants are listed in Table 15. Details of ABE9 base editors are described in International PCT Application No. PCT/2020/049975, which is incorporated herein by reference for its entirety.

TABLE 15
Adenosine Deaminase Base Editor 9 (ABE9) Variants. In the table, “monomer”
indicates an ABE comprising a single TadA*7.10 comprising the indicated alterations
and “heterodimer” indicates an ABE comprising a TadA*7.10 comprising the
indicated alterations fused to an E. coli TadA adenosine deaminase.

| ABE9 Description | Alterations |
|---|---|
| ABE9.1_monomer | E25F, V82S, Y123H, T133K, Y147R, Q154R |
| ABE9.2_monomer | E25F, V82S, Y123H, Y147R, Q154R |
| ABE9.3_monomer | V82S, Y123H, P124W, Y147R, Q154R |
| ABE9.4_monomer | L51W, V82S, Y123H, C146R, Y147R, Q154R |
| ABE9.5_monomer | P54C, V82S, Y123H, Y147R, Q154R |
| ABE9.6_monomer | Y73S, V82S, Y123H, Y147R, Q154R |
| ABE9.7_monomer | N38G, V82T, Y123H, Y147R, Q154R |
| ABE9.8_monomer | R23H, V82S, Y123H, Y147R, Q154R |
| ABE9.9_monomer | R21N, V82S, Y123H, Y147R, Q154R |
| ABE9.10_monomer | V82S, Y123H, Y147R, Q154R, A158K |
| ABE9.11_monomer | N72K, V82S, Y123H, D139L, Y147R, Q154R, |
| ABE9.12_monomer | E25F, V82S, Y123H, D139M, Y147R, Q154R |
| ABE9.13_monomer | M70V, V82S, M94V, Y123H, Y147R, Q154R |
| ABE9.14_monomer | Q71M, V82S, Y123H, Y147R, Q154R |
| ABE9.15_heterodimer | E25F, V82S, Y123H, T133K, Y147R, Q154R |
| ABE9.16_heterodimer | E25F, V82S, Y123H, Y147R, Q154R |
| ABE9.17_heterodimer | V82S, Y123H, P124W, Y147R, Q154R |
| ABE9.18_heterodimer | L51W, V82S, Y123H, C146R, Y147R, Q154R |
| ABE9.19_heterodimer | P54C, V82S, Y123H, Y147R, Q154R |
| ABE9.2 _heterodimer | Y73S, V82S, Y123H, Y147R, Q154R |
| ABE9.21_heterodimer | N38G, V82T, Y123H, Y147R, Q154R |
| ABE9.22_heterodimer | R23H, V82S, Y123H, Y147R, Q154R |
| ABE9.23_heterodimer | R21N, V82S, Y123H, Y147R, Q154R |
| ABE9.24_heterodimer | V82S, Y123H, Y147R, Q154R, A158K |
| ABE9.25_heterodimer | N72K, V82S, Y123H, D139L, Y147R, Q154R, |
| ABE9.26_heterodimer | E25F, V82S, Y123H, D139M, Y147R, Q154R |
| ABE9.27 _heterodimer | M70V, V82S, M94V, Y123H, Y147R, Q154R |
| ABE9.28_heterodimer | Q71M, V82S, Y123H, Y147R, Q154R |
| ABE9.29_monomer | E25F_I76Y_V82S_Y123H_Y147R_Q154R |
| ABE9.30_monomer | I76Y_V82T_Y123H_Y147R_Q154R |
| ABE9.31_monomer | N38G_I76Y_V82S_Y123H_Y147R_Q154R |
| ABE9.32_monomer | N38G_I76Y_V82T_Y123H_Y147R_Q154R |
| ABE9.33_monomer | R23H_I76Y_V82S_Y123H_Y147R_Q154R |
| ABE9.34_monomer | P54C_I76Y_V82S_Y123H_Y147R_Q154R |
| ABE9.35_monomer | R21N_I76Y_V82S_Y123H_Y147R_Q154R |
| ABE9.36_monomer | I76Y_V82S_Y123H_D138M_Y147R_Q154R |
| ABE9.37_monomer | Y72S_I76Y_V82S_Y123H_Y147R_Q154R |
| ABE9.38_heterodimer | E25F_I76Y_V82S_Y123H_Y147R_Q154R |
| ABE9.39_heterodimer | I76Y_V82T_Y123H_Y147R_Q154R |
| ABE9.40_heterodimer | N38G_I76Y_V82S_Y123H_Y147R_Q154R |
| ABE9.41_heterodimer | N38G_I76Y_V82T_Y123H_Y147R_Q154R |
| ABE9.42_heterodimer | R23H_I76Y_V82S_Y123H_Y147R_Q154R |
| ABE9.43_heterodimer | P54C_I76Y_V82S_Y123H_Y147R_Q154R |
| ABE9.44_heterodimer | R21N_I76Y_V82S_Y123H_Y147R_Q154R |
| ABE9.45_heterodimer | I76Y_V82S_Y123H_D138M_Y147R_Q154R |
| ABE9.46_heterodimer | Y72S_I76Y_V82S_Y123H_Y147R_Q154R |
| ABE9.47_monomer | N72K_V82S, Y123H, Y147R, Q154R |
| ABE9.48_monomer | Q71M_V82S, Y123H, Y147R, Q154R |
| ABE9.49_monomer | M70V, V82S, M94V, Y123H, Y147R, Q154R |
| ABE9.50_monomer | V82S, Y123H, T133K, Y147R, Q154R |
| ABE9.51_monomer | V82S, Y123H, T133K, Y147R, Q154R, A158K |
| ABE9.52_monomer | M70V, Q71M, N72K, V82S, Y123H, Y147R, Q154R |
| ABE9.53_heterodimer | N72K_V82S, Y123H, Y147R, Q154R |
| ABE9.54_heterodimer | Q71M_V82S, Y123H, Y147R, Q154R |
| ABE9.55_heterodimer | M70V, V82S, M94V, Y123H, Y147R, Q154R |
| ABE9.56_heterodimer | V82S, Y123H, T133K, Y147R, Q154R |
| ABE9.57_heterodimer | V82S, Y123H, T133K, Y147R, Q154R, A158K |
| ABE9.58_heterodimer | M70V, Q71M, N72K, V82S, Y123H, Y147R, Q154R |

[0610] In some embodiments, the base editor comprises a domain comprising all or a portion of a uracil glycosylase inhibitor (UGI). In some embodiments, the base editor comprises a domain comprising all or a portion of a nucleic acid polymerase. In some embodiments, a base editor can comprise as a domain all or a portion of a nucleic acid polymerase (NAP). For example, a base editor can comprise all or a portion of a eukaryotic NAP. In some embodiments, a NAP or portion thereof incorporated into a base editor is a DNA polymerase. In some embodiments, a NAP or portion thereof incorporated into a base editor has translesion polymerase activity. In some embodiments, a NAP or portion thereof incorporated into a base editor is a translesion DNA polymerase. In some embodiments, a NAP or portion thereof incorporated into a base editor is a Rev7, Rev1 complex, polymerase iota, polymerase kappa, or polymerase eta. In some embodiments, a NAP or portion thereof incorporated into a base editor is a eukaryotic polymerase alpha, beta, gamma, delta, epsilon, gamma, eta, iota, kappa, lambda, mu, or nu component. In some embodiments, a NAP or portion thereof incorporated into a base editor comprises an amino acid sequence that is at least 75%, 80%, 85%, 90%, 95%, 96%, 97%, 98%, 99%, or 99.5% identical to a nucleic acid polymerase (e.g., a translesion DNA polymerase). In some embodiments, a nucleic acid polymerase or portion thereof incorporated into a base editor is a translesion DNA polymerase.

[0611] In some embodiments, a domain of the base editor can comprise multiple domains. For example, the base editor comprising a polynucleotide programmable nucleotide binding domain derived from Cas9 can comprise a REC lobe and an NUC lobe corresponding to the REC lobe and NUC lobe of a wild-type or natural Cas9. In another example, the base editor can comprise one or more of a RuvCI domain, BH domain, REC1 domain, REC2 domain, RuvCII domain, L1 domain, HNH domain, L2 domain, RuvCIII domain, WED domain, TOPO domain or CTD domain. In some embodiments, one or more domains of the base editor comprise a mutation (e.g., substitution, insertion, deletion) relative to a wild-type version of a polypeptide comprising the domain. For example, an HNH domain of a polynucleotide programmable DNA binding domain can comprise an H840A substitution. In another example, a RuvCI domain of a polynucleotide programmable DNA binding domain can comprise a D10A substitution.

[0612] Different domains (e.g., adjacent domains) of the base editor disclosed herein can be connected to each other with or without the use of one or more linker domains (e.g., an XTEN linker domain). In some embodiments, a linker domain can be a bond (e.g., covalent bond), chemical group, or a molecule linking two molecules or moieties, e.g., two domains of a fusion protein, such as, for example, a first domain (e.g., Cas9-derived domain) and a second domain (e.g., an adenosine deaminase domain or a cytidine deaminase domain). In some embodiments, a linker is a covalent bond (e.g., a carbon-carbon bond, disulfide bond, carbon-hetero atom bond, etc.). In certain embodiments, a linker is a carbon nitrogen bond of an amide linkage. In certain embodiments, a linker is a cyclic or acyclic, substituted or unsubstituted, branched or unbranched aliphatic or heteroaliphatic linker. In certain embodiments, a linker is polymeric (e.g., polyethylene, polyethylene glycol, polyamide, polyester, etc.). In certain embodiments, a linker comprises a monomer, dimer, or polymer of aminoalkanoic acid. In some embodiments, a linker comprises an aminoalkanoic acid (e.g., glycine, ethanoic acid, alanine, beta-alanine, 3-aminopropanoic acid, 4-aminobutanoic acid, 5-pentanoic acid, etc.). In some embodiments, a linker comprises a monomer, dimer, or polymer of aminohexanoic acid (Ahx). In certain embodiments, a linker is based on a carbocyclic moiety (e.g., cyclopentane, cyclohexane). In other embodiments, a linker comprises a polyethylene glycol moiety (PEG). In certain embodiments, a linker comprises an aryl or heteroaryl moiety. In certain embodiments, the linker is based on a phenyl ring. A linker can include functionalized moieties to facilitate attachment of a nucleophile (e.g., thiol, amino) from the peptide to the linker. Any electrophile can be used as part of the linker. Exemplary electrophiles include, but are not limited to, activated esters, activated amides, Michael acceptors, alkyl halides, aryl halides, acyl halides, and isothiocyanates. In some embodiments, a linker joins a gRNA binding domain of an RNA-programmable nuclease, including a Cas9 nuclease domain, and the catalytic domain of a nucleic acid editing protein. In some embodiments, a linker joins a dCas9 and a second domain (e.g., UGI, etc.).

### Linkers

[0613] In certain embodiments, linkers may be used to link any of the peptides or peptide domains of the invention. The linker may be as simple as a covalent bond, or it may be a polymeric linker many atoms in length. In certain embodiments, the linker is a polypeptide or based on amino acids. In other embodiments, the linker is not peptide-like. In certain embodiments, the linker is a covalent bond (e.g., a carbon-carbon bond, disulfide bond, carbon-heteroatom bond, etc.). In certain embodiments, the linker is a carbon-nitrogen bond of an amide linkage. In certain embodiments, the linker is a cyclic or acyclic, substituted or unsubstituted, branched or unbranched aliphatic or heteroaliphatic linker. In certain embodiments, the linker is polymeric (e.g., polyethylene, polyethylene glycol, polyamide, polyester, etc.). In certain embodiments, the linker comprises a monomer, dimer, or polymer of aminoalkanoic acid. In certain embodiments, the linker comprises an aminoalkanoic acid (e.g., glycine, ethanoic acid, alanine, beta-alanine, 3-aminopropanoic acid, 4-aminobutanoic acid, 5-pentanoic acid, etc.). In certain embodiments, the linker comprises a monomer, dimer, or polymer of aminohexanoic acid (Ahx). In certain embodiments, the linker is based on a carbocyclic moiety (e.g., cyclopentane, cyclohexane). In other embodiments, the linker comprises a polyethylene glycol moiety (PEG). In other embodiments, the linker comprises amino acids. In certain embodiments, the linker comprises a peptide. In certain embodiments, the linker comprises an aryl or heteroaryl moiety. In certain embodiments, the linker is based on a phenyl ring. The linker may include functionalized moieties to facilitate attachment of a nucleophile (e.g., thiol, amino) from the peptide to the linker. Any electrophile may be used as part of the linker. Exemplary electrophiles include, but are not limited to, activated esters, activated amides, Michael acceptors, alkyl halides, aryl halides, acyl halides, and isothiocyanates.

[0614] Typically, a linker is positioned between, or flanked by, two groups, molecules, or other moieties and connected to each one via a covalent bond, thus connecting the two. In some embodiments, a linker is an amino acid or a plurality of amino acids (e.g., a peptide or protein). In some embodiments, a linker is an organic molecule, group, polymer, or chemical moiety. In some embodiments, a linker is 2-100 amino acids in length, for example, 2, 3, 4, 5, 6, 7, 8, 9, 10, 11, 12, 13, 14, 15, 16, 17, 18, 19, 20, 21, 22, 23, 24, 25, 26, 27, 28, 29, 30, 30-35, 35-40, 40-45, 45-50, 50-60, 60-70, 70-80, 80-90, 90-100, 100-150, or 150-200 amino acids in length. In some embodiments, the linker is about 3 to about 104 (e.g., 5, 6, 7, 8, 9, 10, 11, 12, 13, 14, 15, 16, 17, 18, 19, 20, 21, 22, 23, 24, 25, 26, 27, 28, 29, 30, 31, 32, 33, 34, 35, 36, 37, 38, 39, 40, 41, 42, 43, 44, 45, 46, 47, 48, 49, 50, 55, 60, 65, 70, 75, 80, 85, 90, 95, or 100) amino acids in length. Longer or shorter linkers are also contemplated.

[0615] In some embodiments, any of the fusion proteins provided herein, comprise a cytidine or adenosine deaminase and a Cas9 domain that are fused to each other via a linker. Various linker lengths and flexibilities between the cytidine or adenosine deaminase and the Cas9 domain can be employed (e.g., ranging from very flexible linkers of the form (GGGS)n (SEQ ID NO: 1308), (GGGGS)n (SEQ ID NO: 109), and (G)n to more rigid linkers of the form (EAAAK)n (SEQ ID NO: 1309), (SGGS)n (SEQ ID NO: 57), SGSETPGTSESATPES (SEQ ID NO: 56) (see, e.g., Guilinger J P, et al. Fusion of catalytically inactive Cas9 to FokI nuclease improves the specificity of genome modification. Nat. Biotechnol. 2014; 32(6): 577-82; the entire contents are incorporated herein by reference) and (XP)n) in order to achieve the optimal length for activity for the cytidine or adenosine deaminase nucleobase editor. In some embodiments, n is 1, 2, 3, 4, 5, 6, 7, 8, 9, 10, 11, 12, 13, 14, or 15. In some embodiments, the linker comprises a (GGS)n motif, wherein n is 1, 3, or 7 (SEQ ID NO: 4039). In some embodiments, cytidine deaminase or adenosine deaminase and the Cas9 domain of any of the fusion proteins provided herein are fused via a linker comprising the amino acid sequence SGSETPGTSESATPES (SEQ ID NO: 56), which can also be referred to as the XTEN linker. In some embodiments, a linker comprises a plurality of proline residues and is 5-21, 5-14, 5-9, 5-7 amino acids in length, e.g., PAPAP (SEQ ID NO: 65), PAPAPA (SEQ ID NO: 66), PAPAPAP (SEQ ID NO: 67), PAPAPAPA (SEQ ID NO: 68), P(AP)4 (SEQ ID NO: 69), P(AP)7 (SEQ ID NO: 70), P(AP)10 (SEQ ID NO: 71) (see, e.g., Tan J, Zhang F, Karcher D, Bock R. Engineering of high-precision base editors for site-specific single nucleotide replacement. Nat Commun. 2019 January 25; 10(1):439; the entire contents are incorporated herein by reference). Such proline-rich linkers are also termed “rigid” linkers.

[0616] In another embodiment, the base editor system comprises a component (protein) that interacts non-covalently with a deaminase (DNA deaminase), e.g., an adenosine or a cytidine deaminase, and transiently attracts the adenosine or cytidine deaminase to the target nucleobase in a target polynucleotide sequence for specific editing, with minimal or reduced bystander or target-adjacent effects. Such a non-covalent system and method involving deaminase-interacting proteins serves to attract a DNA deaminase to a particular genomic target nucleobase and decouples the events of on-target and target-adjacent editing, thus enhancing the achievement of more precise single base substitution mutations. In an embodiment, the deaminase-interacting protein binds to the deaminase (e.g., adenosine deaminase or cytidine deaminase) without blocking or interfering with the active (catalytic) site of the deaminase from engaging the target nucleobase (e.g., adenosine or cytidine, respectively). Such as system, termed “MagnEdit,” involves interacting proteins tethered to a Cas9 and gRNA complex and can attract a co-expressed adenosine or cytidine deaminase (either exogenous or endogenous) to edit a specific genomic target site, and is described in McCann, J. et al., 2020, “MagnEdit—interacting factors that recruit DNA-editing enzymes to single base targets,” Life-Science-Alliance, Vol. 3, No. 4 (e201900606), (doi 10.26508/Isa.201900606), the contents of which are incorporated by reference herein in their entirety. In an embodiment, the DNA deaminase is an adenosine deaminase variant (e.g., TadA*8) as described herein.

[0617] In another embodiment, a system called “Suntag,” involves non-covalently interacting components used for recruiting protein (e.g., adenosine deaminase or cytidine deaminase) components, or multiple copies thereof, of base editors to polynucleotide target sites to achieve base editing at the site with reduced adjacent target editing, for example, as described in Tanenbaum, M. E. et al., “A protein tagging system for signal amplification in gene expression and fluorescence imaging,” Cell. 2014 Oct. 23; 159(3): 635-646. doi:10.1016/j.cell.2014.09.039; and in Huang, Y.-H. et al., 2017, “DNA epigenome editing using CRISPR-Cas SunTag-directed DNMT3A,” Genome Biol 18: 176. doi:10.1186/s13059-017-1306-z, the contents of each of which are incorporated by reference herein in their entirety. In an embodiment, the DNA deaminase is an adenosine deaminase variant (e.g., TadA*8) as described herein.

Nucleic Acid Programmable DNA Binding Proteins with Guide RNAs

[0618] Provided herein are compositions and methods for base editing in cells. Further provided herein are compositions comprising a guide polynucleic acid sequence, e.g. a guide RNA sequence, or a combination of 2, 3, 4, 5, 6, 7, 8, 9, 10, 11, 12, 13, 14, 15, 16, 17, 18, 19, 20, or more guide RNAs as provided herein. In some embodiments, a composition for base editing as provided herein further comprises a polynucleotide that encodes a base editor, e.g. a C-base editor or an A-base editor. For example, a composition for base editing may comprise a mRNA sequence encoding a BE, a BE4, an ABE, and a combination of one or more guide RNAs as provided. A composition for base editing may comprise a base editor polypeptide and a combination of one or more of any guide RNAs provided herein. Such a composition may be used to effect base editing in a cell through different delivery approaches, for example, electroporation, nucleofection, viral transduction or transfection. In some embodiments, the composition for base editing comprises an mRNA sequence that encodes a base editor and a combination of one or more guide RNA sequences provided herein for electroporation.

[0619] Some aspects of this disclosure provide complexes comprising any of the fusion proteins provided herein, and a guide RNA bound to a nucleic acid programmable DNA binding protein (napDNAbp) domain (e.g., a Cas9 (e.g., a dCas9, a nuclease active Cas9, or a Cas9 nickase) or Cas12) of the fusion protein. These complexes are also termed ribonucleoproteins (RNPs). In some embodiments, the guide nucleic acid (e.g., guide RNA) is from 15-100 nucleotides long and comprises a sequence of at least 10 contiguous nucleotides that is complementary to a target sequence. In some embodiments, the guide RNA is 15, 16, 17, 18, 19, 20, 21, 22, 23, 24, 25, 26, 27, 28, 29, 30, 31, 32, 33, 34, 35, 36, 37, 38, 39, 40, 41, 42, 43, 44, 45, 46, 47, 48, 49, or 50 nucleotides long. In some embodiments, the guide RNA comprises a sequence of 15, 16, 17, 18, 19, 20, 21, 22, 23, 24, 25, 26, 27, 28, 29, 30, 31, 32, 33, 34, 35, 36, 37, 38, 39, or 40 contiguous nucleotides that is complementary to a target sequence. In some embodiments, the target sequence is a DNA sequence. In some embodiments, the target sequence is an RNA sequence. In some embodiments, the target sequence is a sequence in the genome of a bacteria, yeast, fungi, insect, plant, or animal. In some embodiments, the target sequence is a sequence in the genome of a human. In some embodiments, the 3′ end of the target sequence is immediately adjacent to a canonical PAM sequence (NGG). In some embodiments, the 3′ end of the target sequence is immediately adjacent to a non-canonical PAM sequence (e.g., a sequence listed in Table 6 or 5′-NAA-3′). In some embodiments, the guide nucleic acid (e.g., guide RNA) is complementary to a sequence in a gene of interest (e.g., a gene associated with a disease or disorder).

[0620] Some aspects of this disclosure provide methods of using the fusion proteins, or complexes provided herein. For example, some aspects of this disclosure provide methods comprising contacting a DNA molecule with any of the fusion proteins provided herein, and with at least one guide RNA, wherein the guide RNA is about 15-100 nucleotides long and comprises a sequence of at least 10 contiguous nucleotides that is complementary to a target sequence. In some embodiments, the 3′ end of the target sequence is immediately adjacent to an AGC, GAG, TTT, GTG, or CAA sequence. In some embodiments, the 3′ end of the target sequence is immediately adjacent to an NGA, NGCG, NGN, NNGRRT, NNNRRT, NGCG, NGCN, NGTN, NGTN, NGTN, or 5′ (TTTV) sequence. In some embodiments, the 3′ end of the target sequence is immediately adjacent to an e.g., TTN, DTTN, GTTN, ATTN, ATTC, DTTNT, WTTN, HATY, TTTN, TTTV, TTTC, TG, RTR, or YTN PAM site.

[0621] It will be understood that the numbering of the specific positions or residues in the respective sequences depends on the particular protein and numbering scheme used. Numbering might differ, e.g., in precursors of a mature protein and the mature protein itself, and differences in sequences from species to species may affect numbering. One of skill in the art will be able to identify the respective residue in any homologous protein and in the respective encoding nucleic acid by methods well known in the art, e.g., by sequence alignment and determination of homologous residues.

[0622] It will be apparent to those of skill in the art that in order to target any of the fusion proteins disclosed herein, to a target site, e.g., a site comprising a mutation to be edited, it is typically necessary to co-express the fusion protein together with a guide RNA. As explained in more detail elsewhere herein, a guide RNA typically comprises a tracrRNA framework allowing for napDNAbp (e.g., Cas9 or Cas12) binding, and a guide sequence, which confers sequence specificity to the napDNAbp:nucleic acid editing enzyme/domain fusion protein. Alternatively, the guide RNA and tracrRNA may be provided separately, as two nucleic acid molecules. In some embodiments, the guide RNA comprises a structure, wherein the guide sequence comprises a sequence that is complementary to the target sequence. The guide sequence is typically 20 nucleotides long. The sequences of suitable guide RNAs for targeting napDNAbp:nucleic acid editing enzyme/domain fusion proteins to specific genomic target sites will be apparent to those of skill in the art based on the instant disclosure. Such suitable guide RNA sequences typically comprise guide sequences that are complementary to a nucleic sequence within 50 nucleotides upstream or downstream of the target nucleotide to be edited. Some exemplary guide RNA sequences suitable for targeting any of the provided fusion proteins to specific target sequences are provided herein.

[0623] Distinct portions of sgRNA are predicted to form various features that interact with Cas9 (e.g., SpyCas9) and/or the DNA target. Six conserved modules have been identified within native crRNA:tracrRNA duplexes and single guide RNAs (sgRNAs) that direct Cas9 endonuclease activity (see Briner et al., Guide RNA Functional Modules Direct Cas9 Activity and Orthogonality Mol Cell. 2014 Oct. 23; 56(2):333-339). The six modules include the spacer responsible for DNA targeting, the upper stem, bulge, lower stem formed by the CRISPR repeat:tracrRNA duplex, the nexus, and hairpins from the 3′ end of the tracrRNA. The upper and lower stems interact with Cas9 mainly through sequence-independent interactions with the phosphate backbone. In some embodiments, the upper stem is dispensable. In some embodiments, the conserved uracil nucleotide sequence at the base of the lower stem is dispensable. The bulge participates in specific side-chain interactions with the Rec1 domain of Cas9. The nucleobase of U44 interacts with the side chains of Tyr 325 and His 328, while G43 interacts with Tyr 329. The nexus forms the core of the sgRNA:Cas9 interactions and lies at the intersection between the sgRNA and both Cas9 and the target DNA. The nucleobases of A51 and A52 interact with the side chain of Phe 1105; U56 interacts with Arg 457 and Asn 459; the nucleobase of U59 inserts into a hydrophobic pocket defined by side chains of Arg 74, Asn 77, Pro 475, Leu 455, Phe 446, and Ile 448; C60 interacts with Leu 455, Ala 456, and Asn 459, and C61 interacts with the side chain of Arg 70, which in turn interacts with C15. In some embodiments, one or more of these mutations are made in the bulge and/or the nexus of a sgRNA for a Cas9 (e.g., spyCas9) to optimize sgRNA:Cas9 interactions.

[0624] Moreover, the tracrRNA nexus and hairpins are critical for Cas9 pairing and can be swapped to cross orthogonality barriers separating disparate Cas9 proteins, which is instrumental for further harnessing of orthogonal Cas9 proteins. In some embodiments, the nexus and hairpins are swapped to target orthogonal Cas9 proteins. In some embodiments, a sgRNA is dispensed of the upper stem, hairpin 1, and/or the sequence flexibility of the lower stem to design a guide RNA that is more compact and conformationally stable. In some embodiments, the modules are modified to optimize multiplex editing using a single Cas9 with various chimeric guides or by concurrently using orthogonal systems with different combinations of chimeric sgRNAs. Details regarding guide functional modules and methods thereof are described, for example, in Briner et al., Guide RNA Functional Modules Direct Cas9 Activity and Orthogonality Mol Cell. 2014 Oct. 23; 56(2):333-339, the contents of which is incorporated by reference herein in its entirety.

[0625] The domains of the base editor disclosed herein can be arranged in any order. Non-limiting examples of a base editor comprising a fusion protein comprising e.g., a polynucleotide-programmable nucleotide-binding domain (e.g., Cas9 or Cas12) and a deaminase domain (e.g., cytidine or adenosine deaminase) can be arranged as follows:

[0626] NH2-[nucleobase editing domain]-Linker1-[nucleobase editing domain]-COOH;

[0627] NH2-[deaminase]-Linker1-[nucleobase editing domain]-COOH;

[0628] NH2-[deaminase]-Linker1-[nucleobase editing domain]-Linker2-[UGI]-COOH;

[0629] NH2-[deaminase]-Linker1-[nucleobase editing domain]-COOH;

[0630] NH2-[adenosine deaminase]-Linker1-[nucleobase editing domain]-COOH;

[0631] NH2-[nucleobase editing domain]-[deaminase]-COOH;

[0632] NH2-[deaminase]-[nucleobase editing domain]-[inosine BER inhibitor]-COOH;

[0633] NH2-[deaminase]-[inosine BER inhibitor]-[nucleobase editing domain]-COOH;

[0634] NH2-[inosine BER inhibitor]-[deaminase]-[nucleobase editing domain]-COOH;

[0635] NH2-[nucleobase editing domain]-[deaminase]-[inosine BER inhibitor]-COOH;

[0636] NH2-[nucleobase editing domain]-[inosine BER inhibitor]-[deaminase]-COOH;

[0637] NH2-[inosine BER inhibitor]-[nucleobase editing domain]-[deaminase]-COOH;

[0638] NH2-[nucleobase editing domain]-Linker1-[deaminase]-Linker2-[nucleobase editing domain]-COOH;

[0639] NH2-[nucleobase editing domain]-Linker1-[deaminase]-[nucleobase editing domain]-COOH;

[0640] NH2-[nucleobase editing domain]-[deaminase]-Linker2-[nucleobase editing domain]-COOH;

[0641] NH2-[nucleobase editing domain]-[deaminase]-[nucleobase editing domain]-COOH;

[0642] NH2-[nucleobase editing domain]-Linker1-[deaminase]-Linker2-[nucleobase editing domain]-[inosine BER inhibitor]-COOH;

[0643] NH2-[nucleobase editing domain]-Linker1-[deaminase]-[nucleobase editing domain]-[inosine BER inhibitor]-COOH;

[0644] NH2-[nucleobase editing domain]-[deaminase]-Linker2-[nucleobase editing domain]-[inosine BER inhibitor]-COOH;

[0645] NH2-[nucleobase editing domain]-[deaminase]-[nucleobase editing domain]-[inosine BER inhibitor]-COOH;

[0646] NH2-[inosine BER inhibitor]-[nucleobase editing domain]-Linker1-[deaminase]-Linker2-[nucleobase editing domain]-COOH;

[0647] NH2-[inosine BER inhibitor]-[nucleobase editing domain]-Linker1-[deaminase]-[nucleobase editing domain]-COOH;

[0648] NH2-[inosine BER inhibitor]-[nucleobase editing domain]-[deaminase]-Linker2-[nucleobase editing domain]-COOH; or

[0649] NH2-[inosine BER inhibitor]NH2-[nucleobase editing domain]-[deaminase]-[nucleobase editing domain]-COOH.

[0650] In some embodiments, the base editing fusion proteins provided herein need to be positioned at a precise location, for example, where a target base is placed within a defined region (e.g., a “deamination window”). In some embodiments, a target can be within a 4-base region. In some embodiments, such a defined target region can be approximately 15 bases upstream of the PAM. See Komor, A. C., et al., “Programmable editing of a target base in genomic DNA without double-stranded DNA cleavage” Nature 533, 420-424 (2016); Gaudelli, N. M., et al., “Programmable base editing of A•T to G•C in genomic DNA without DNA cleavage” Nature 551, 464-471 (2017); and Komor, A. C., et al., “Improved base excision repair inhibition and bacteriophage Mu Gam protein yields C:G-to-T:A base editors with higher efficiency and product purity” Science Advances 3:eaao4774 (2017), the entire contents of which are hereby incorporated by reference.

[0651] A defined target region can be a deamination window. A deamination window can be the defined region in which a base editor acts upon and deaminates a target nucleotide. In some embodiments, the deamination window is within a 2, 3, 4, 5, 6, 7, 8, 9, or 10 base regions. In some embodiments, the deamination window is 5, 6, 7, 8, 9, 10, 11, 12, 13, 14, 15, 16, 17, 18, 19, 20, 21, 22, 23, 24, or 25 bases upstream of the PAM.

[0652] The base editors of the present disclosure can comprise any domain, feature or amino acid sequence which facilitates the editing of a target polynucleotide sequence. For example, in some embodiments, the base editor comprises a nuclear localization sequence (NLS). In some embodiments, an NLS of the base editor is localized between a deaminase domain and a napDNAbp domain. In some embodiments, an NLS of the base editor is localized C-terminal to a napDNAbp domain.

[0653] Non-limiting examples of protein domains which can be included in the fusion protein include a deaminase domain (e.g., adenosine deaminase or cytidine deaminase), a uracil glycosylase inhibitor (UGI) domain, epitope tags, reporter gene sequences, and/or protein domains having one or more of the activities described herein.

[0654] A domain may be detected or labeled with an epitope tag, a reporter protein, other binding domains. Non-limiting examples of epitope tags include histidine (His) tags, V5 tags, FLAG tags, influenza hemagglutinin (HA) tags, Myc tags, VSV-G tags, and thioredoxin (Trx) tags. Examples of reporter genes include, but are not limited to, glutathione-5-transferase (GST), horseradish peroxidase (HRP), chloramphenicol acetyltransferase (CAT) beta-galactosidase, beta-glucuronidase, luciferase, green fluorescent protein (GFP), HcRed, DsRed, cyan fluorescent protein (CFP), yellow fluorescent protein (YFP), and autofluorescent proteins including blue fluorescent protein (BFP). Additional protein sequences can include amino acid sequences that bind DNA molecules or bind other cellular molecules, including but not limited to maltose binding protein (MBP), S-tag, Lex A DNA binding domain (DBD) fusions, GAL4 DNA binding domain fusions, and herpes simplex virus (HSV) BP16 protein fusions.

### Methods of Using Fusion Proteins Comprising a Cytidine or Adenosine Deaminase and a Cas9 Domain

[0655] Some aspects of this disclosure provide methods of using the fusion proteins, or complexes provided herein. For example, some aspects of this disclosure provide methods comprising contacting a DNA molecule with any of the fusion proteins provided herein, and with at least one guide RNA described herein.

[0656] In some embodiments, a fusion protein of the invention is used for editing a target gene of interest. In particular, a cytidine deaminase or adenosine deaminase nucleobase editor described herein is capable of making multiple mutations within a target sequence. These mutations may affect the function of the target. For example, when a cytidine deaminase or adenosine deaminase nucleobase editor is used to target a regulatory region the function of the regulatory region is altered and the expression of the downstream protein is reduced or eliminated.

[0657] It will be understood that the numbering of the specific positions or residues in the respective sequences depends on the particular protein and numbering scheme used. Numbering might be different, e.g., in precursors of a mature protein and the mature protein itself, and differences in sequences from species to species may affect numbering. One of skill in the art will be able to identify the respective residue in any homologous protein and in the respective encoding nucleic acid by methods well known in the art, e.g., by sequence alignment and determination of homologous residues.

[0658] It will be apparent to those of skill in the art that in order to target any of the fusion proteins comprising a Cas9 domain and a cytidine or adenosine deaminase, as disclosed herein, to a target site, e.g., a site comprising a mutation to be edited, a guide RNA, e.g., an sgRNA, may be co-expressed. As explained in more detail elsewhere herein, a guide RNA typically comprises a tracrRNA framework allowing for Cas9 binding, and a guide sequence, which confers sequence specificity to the Cas9:nucleic acid editing enzyme/domain fusion protein. Alternatively, the guide RNA and tracrRNA may be provided separately, as two nucleic acid molecules. In some embodiments, the guide RNA comprises a structure, wherein the guide sequence comprises a sequence that is complementary to the target sequence. The guide sequence is typically 20 nucleotides long. The sequences of suitable guide RNAs for targeting Cas9:nucleic acid editing enzyme/domain fusion proteins to specific genomic target sites will be apparent to those of skill in the art based on the instant disclosure. Such suitable guide RNA sequences typically comprise guide sequences that are complementary to a nucleic sequence within 50 nucleotides upstream or downstream of the target nucleotide to be edited. Some exemplary guide RNA sequences suitable for targeting any of the provided fusion proteins to specific target sequences are provided herein.

### Base Editor Efficiency

[0659] In some embodiments, the purpose of the methods provided herein is to alter a gene and/or gene product via gene editing. The nucleobase editing proteins provided herein can be used for gene editing-based human therapeutics in vitro or in vivo. It will be understood by the skilled artisan that the nucleobase editing proteins provided herein, e.g., the fusion proteins comprising a polynucleotide programmable nucleotide binding domain (e.g., Cas9) and a nucleobase editing domain (e.g., an adenosine deaminase domain or a cytidine deaminase domain) can be used to edit a nucleotide from A to G or C to T.

[0660] Advantageously, base editing systems as provided herein provide genome editing without generating double-strand DNA breaks, without requiring a donor DNA template, and without inducing an excess of stochastic insertions and deletions as CRISPR may do. In some embodiments, the present disclosure provides base editors that efficiently generate an intended mutation, such as a STOP codon, in a nucleic acid (e.g., a nucleic acid within a genome of a subject) without generating a significant number of unintended mutations, such as unintended point mutations. In some embodiments, an intended mutation is a mutation that is generated by a specific base editor (e.g., adenosine base editor or cytidine base editor) bound to a guide polynucleotide (e.g., gRNA), specifically designed to generate the intended mutation. In some embodiments, the intended mutation is in a gene associated with a target antigen associated with a disease or disorder, e.g., a neurological or ophthalmological disease or disorder. In some embodiments, the intended mutation is an adenine (A) to guanine (G) point mutation (e.g., SNP) in a gene associated with a target antigen associated with a disease or disorder, e.g a neurological or ophthalmological disease or disorder. In some embodiments, the intended mutation is an adenine (A) to guanine (G) point mutation within the coding region or non-coding region of a gene (e.g., regulatory region or element). In some embodiments, the intended mutation is a cytosine (C) to thymine (T) point mutation (e.g., SNP) in a gene associated with a target antigen associated with a disease or disorder, e.g., a neurological or ophthalmological disease or disorder. In some embodiments, the intended mutation is a cytosine (C) to thymine (T) point mutation within the coding region or non-coding region of a gene (e.g., regulatory region or element). In some embodiments, the intended mutation is a point mutation that generates a STOP codon, for example, a premature STOP codon within the coding region of a gene. In some embodiments, the intended mutation is a mutation that eliminates a stop codon.

[0661] The base editors of the invention advantageously modify a specific nucleotide base encoding a protein without generating a significant proportion of indels. An “indel”, as used herein, refers to the insertion or deletion of a nucleotide base within a nucleic acid. Such insertions or deletions can lead to frame shift mutations within a coding region of a gene. In some embodiments, it is desirable to generate base editors that efficiently modify (e.g. mutate) a specific nucleotide within a nucleic acid, without generating a large number of insertions or deletions (i.e., indels) in the nucleic acid. In some embodiments, it is desirable to generate base editors that efficiently modify (e.g. mutate or methylate) a specific nucleotide within a nucleic acid, without generating a large number of insertions or deletions (i.e., indels) in the nucleic acid. In certain embodiments, any of the base editors provided herein can generate a greater proportion of intended modifications (e.g., methylations) versus indels. In certain embodiments, any of the base editors provided herein can generate a greater proportion of intended modifications (e.g., mutations) versus indels.

[0662] In some embodiments, the base editors provided herein are capable of generating a ratio of intended mutations to indels (i.e., intended point mutations:unintended point mutations) that is greater than 1:1. In some embodiments, the base editors provided herein are capable of generating a ratio of intended mutations to indels that is at least 1.5:1, at least 2:1, at least 2.5:1, at least 3:1, at least 3.5:1, at least 4:1, at least 4.5:1, at least 5:1, at least 5.5:1, at least 6:1, at least 6.5:1, at least 7:1, at least 7.5:1, at least 8:1, at least 10:1, at least 12:1, at least 15:1, at least 20:1, at least 25:1, at least 30:1, at least 40:1, at least 50:1, at least 100:1, at least 200:1, at least 300:1, at least 400:1, at least 500:1, at least 600:1, at least 700:1, at least 800:1, at least 900:1, or at least 1000:1, or more. The number of intended mutations and indels may be determined using any suitable method.

[0663] In some embodiments, the base editors provided herein can limit formation of indels in a region of a nucleic acid. In some embodiments, the region is at a nucleotide targeted by a base editor or a region within 2, 3, 4, 5, 6, 7, 8, 9, or 10 nucleotides of a nucleotide targeted by a base editor. In some embodiments, any of the base editors provided herein can limit the formation of indels at a region of a nucleic acid to less than 1%, less than 1.5%, less than 2%, less than 2.5%, less than 3%, less than 3.5%, less than 4%, less than 4.5%, less than 5%, less than 6%, less than 7%, less than 8%, less than 9%, less than 10%, less than 12%, less than 15%, or less than 20%. The number of indels formed at a nucleic acid region may depend on the amount of time a nucleic acid (e.g., a nucleic acid within the genome of a cell) is exposed to a base editor. In some embodiments, a number or proportion of indels is determined after at least 1 hour, at least 2 hours, at least 6 hours, at least 12 hours, at least 24 hours, at least 36 hours, at least 48 hours, at least 3 days, at least 4 days, at least 5 days, at least 7 days, at least 10 days, or at least 14 days of exposing a nucleic acid (e.g., a nucleic acid within the genome of a cell) to a base editor.

[0664] Some aspects of the disclosure are based on the recognition that any of the base editors provided herein are capable of efficiently generating an intended mutation in a nucleic acid (e.g. a nucleic acid within a genome of a subject) without generating a considerable number of unintended mutations (e.g., spurious off-target editing or bystander editing). In some embodiments, an intended mutation is a mutation that is generated by a specific base editor bound to a gRNA, specifically designed to generate the intended mutation. In some embodiments, the intended mutation is a mutation that generates a stop codon, for example, a premature stop codon within the coding region of a gene. In some embodiments, the intended mutation is a mutation that eliminates a stop codon. In some embodiments, the intended mutation is a mutation that alters the splicing of a gene. In some embodiments, the intended mutation is a mutation that alters the regulatory sequence of a gene (e.g., a gene promotor or gene repressor). In some embodiments, any of the base editors provided herein are capable of generating a ratio of intended mutations to unintended mutations (e.g., intended mutations:unintended mutations) that is greater than 1:1. In some embodiments, any of the base editors provided herein are capable of generating a ratio of intended mutations to unintended mutations that is at least 1.5:1, at least 2:1, at least 2.5:1, at least 3:1, at least 3.5:1, at least 4:1, at least 4.5:1, at least 5:1, at least 5.5:1, at least 6:1, at least 6.5:1, at least 7:1, at least 7.5:1, at least 8:1, at least 10:1, at least 12:1, at least 15:1, at least 20:1, at least 25:1, at least 30:1, at least 40:1, at least 50:1, at least 100:1, at least 150:1, at least 200:1, at least 250:1, at least 500:1, or at least 1000:1, or more. It should be appreciated that the characteristics of the base editors described herein may be applied to any of the fusion proteins, or methods of using the fusion proteins provided herein.

[0665] Base editing is often referred to as a “modification”, such as, a genetic modification, a gene modification and modification of the nucleic acid sequence and is clearly understandable based on the context that the modification is a base editing modification. A base editing modification is therefore a modification at the nucleotide base level, for example as a result of the deaminase activity discussed throughout the disclosure, which then results in a change in the gene sequence, and may affect the gene product. In essence therefore, the gene editing modification described herein may result in a modification of the gene, structurally and/or functionally, wherein the expression of the gene product may be modified, for example, the expression of the gene is knocked out; or conversely, enhanced, or, in some circumstances, the gene function or activity may be modified. Using the methods disclosed herein, a base editing efficiency may be determined as the knockdown efficiency of the gene in which the base editing is performed, wherein the base editing is intended to knockdown the expression of the gene. A knockdown level may be validated quantitatively by determining the expression level by any detection assay, such as assay for protein expression level, for example, by flow cytometry; assay for detecting RNA expression such as quantitative RT-PCR, northern blot analysis, or any other suitable assay such as pyrosequencing; and may be validated qualitatively by nucleotide sequencing reactions.

[0666] In some embodiments, the modification, e.g., single base edit results in at least 10% reduction of the gene targeted expression. In some embodiments, the base editing efficiency may result in at least 10% reduction of the gene targeted expression. In some embodiments, the base editing efficiency may result in at least 20% reduction of the gene targeted expression. In some embodiments, the base editing efficiency may result in at least 30% reduction of the gene targeted expression. In some embodiments, the base editing efficiency may result in at least 40% reduction of the gene targeted expression. In some embodiments, the base editing efficiency may result in at least 50% reduction of the gene targeted expression. In some embodiments, the base editing efficiency may result in at least 60% reduction of the targeted gene expression. In some embodiments, the base editing efficiency may result in at least 70% reduction of the targeted gene expression. In some embodiments, the base editing efficiency may result in at least 80% reduction of the targeted gene expression. In some embodiments, the base editing efficiency may result in at least 90% reduction of the targeted gene expression. In some embodiments, the base editing efficiency may result in at least 91% reduction of the targeted gene expression. In some embodiments, the base editing efficiency may result in at least 92% reduction of the targeted gene expression. In some embodiments, the base editing efficiency may result in at least 93% reduction of the targeted gene expression. In some embodiments, the base editing efficiency may result in at least 94% reduction of the targeted gene expression. In some embodiments, the base editing efficiency may result in at least 95% reduction of the targeted gene expression. In some embodiments, the base editing efficiency may result in at least 96% reduction of the targeted gene expression. In some embodiments, the base editing efficiency may result in at least 97% reduction of the targeted gene expression. In some embodiments, the base editing efficiency may result in at least 98% reduction of the targeted gene expression. In some embodiments, the base editing efficiency may result in at least 99% reduction of the targeted gene expression. In some embodiments, the base editing efficiency may result in knockout (100% knockdown of the gene expression) of the gene that is targeted.

[0667] In some embodiments, any of base editor systems provided herein result in less than 50%, less than 40%, less than 30%, less than 20%, less than 19%, less than 18%, less than 17%, less than 16%, less than 15%, less than 14%, less than 13%, less than 12%, less than 11%, less than 10%, less than 9%, less than 8%, less than 7%, less than 6%, less than 5%, less than 4%, less than 3%, less than 2%, less than 1%, less than 0.9%, less than 0.8%, less than 0.7%, less than 0.6%, less than 0.5%, less than 0.4%, less than 0.3%, less than 0.2%, less than 0.1%, less than 0.09%, less than 0.08%, less than 0.07%, less than 0.06%, less than 0.05%, less than 0.04%, less than 0.03%, less than 0.02%, or less than 0.01% indel formation in the target polynucleotide sequence.

[0668] In some embodiments, targeted modifications, e.g., single base editing, are used simultaneously to target at least 4, 5, 6, 7, 8, 9, 10, 11, 12 13, 14, 15, 16, 17, 18, 19, 20, 21, 22, 23, 24, 25, 26, 27, 28, 29, 30, 31, 32, 33, 34, 35, 36, 37, 38, 39, 40, 41, 42, 43, 44, 45, 46, 47, 48, 49 or 50 different endogenous sequences for base editing with different guide RNAs. In some embodiments, targeted modifications, e.g. single base editing, are used to sequentially target at least 4, 5, 6, 7, 8, 9, 10, 11, 12 13, 14, 15, 16, 17, 18, 19, 20, 21, 22, 23, 24, 25, 26, 27, 28, 29, 30, 31, 32, 33, 34, 35, 36, 37, 38, 39, 40, 41, 42, 43, 44, 45, 46, 47, 48, 49 50, or more different endogenous gene sequences for base editing with different guide RNAs.

[0669] Some aspects of the disclosure are based on the recognition that any of the base editors provided herein are capable of efficiently generating an intended mutation, such as a point mutation, in a nucleic acid (e.g., a nucleic acid within a genome of a subject) without generating a significant number of unintended mutations, such as unintended point mutations (i.e., mutation of bystanders). In some embodiments, any of the base editors provided herein are capable of generating at least 0.01% of intended mutations (i.e., at least 0.01% base editing efficiency). In some embodiments, any of the base editors provided herein are capable of generating at least 0.01%, 1%, 2%, 3%, 4%, 5%, 10%, 15%, 20%, 25%, 30%, 40%, 45%, 50%, 60%, 70%, 80%, 90%, 95%, or 99% of intended mutations.

[0670] In some embodiments, any of base editor systems comprising one of the ABE8 base editor variants described herein result in less than 50%, less than 40%, less than 30%, less than 20%, less than 19%, less than 18%, less than 17%, less than 16%, less than 15%, less than 14%, less than 13%, less than 12%, less than 11%, less than 10%, less than 9%, less than 8%, less than 7%, less than 6%, less than 5%, less than 4%, less than 3%, less than 2%, less than 1%, less than 0.9%, less than 0.8%, less than 0.7%, less than 0.6%, less than 0.5%, less than 0.4%, less than 0.3%, less than 0.2%, less than 0.1%, less than 0.09%, less than 0.08%, less than 0.07%, less than 0.06%, less than 0.05%, less than 0.04%, less than 0.03%, less than 0.02%, or less than 0.01% indel formation in the target polynucleotide sequence. In some embodiments, any of base editor systems comprising one of the ABE8 base editor variants described herein result in less than 0.8% indel formation in the target polynucleotide sequence. In some embodiments, any of base editor systems comprising one of the ABE8 base editor variants described herein result in at most 0.8% indel formation in the target polynucleotide sequence. In some embodiments, any of base editor systems comprising one of the ABE8 base editor variants described herein result in less than 0.3% indel formation in the target polynucleotide sequence. In some embodiments, any of base editor systems comprising one of the ABE8 base editor variants described results in lower indel formation in the target polynucleotide sequence compared to a base editor system comprising one of ABE7 base editors. In some embodiments, any of base editor systems comprising one of the ABE8 base editor variants described herein results in lower indel formation in the target polynucleotide sequence compared to a base editor system comprising an ABE7.10.

[0671] In some embodiments, any of base editor systems comprising one of the ABE8 base editor variants described herein has reduction in indel frequency compared to a base editor system comprising one of the ABE7 base editors. In some embodiments, any of base editor systems comprising one of the ABE8 base editor variants described herein has at least 0.01%, at least 1%, at least 2%, at least 3%, at least 4%, at least 5%, at least 10%, at least 15%, at least 20%, at least 25%, at least 30%, at least 35%, at least 40%, at least 45%, at least 50%, at least 55%, at least 60%, at least 65%, at least 70%, at least 75%, at least 80%, at least 85%, at least 90%, or at least 95% reduction in indel frequency compared to a base editor system comprising one of the ABE7 base editors. In some embodiments, a base editor system comprising one of the ABE8 base editor variants described herein has at least 0.01%, at least 1%, at least 2%, at least 3%, at least 4%, at least 5%, at least 10%, at least 15%, at least 20%, at least 25%, at least 30%, at least 35%, at least 40%, at least 45%, at least 50%, at least 55%, at least 60%, at least 65%, at least 70%, at least 75%, at least 80%, at least 85%, at least 90%, or at least 95% reduction in indel frequency compared to a base editor system comprising an ABE7.10.

[0672] The invention provides adenosine deaminase variants (e.g., ABE8 variants) that have increased efficiency and specificity. In particular, the adenosine deaminase variants described herein are more likely to edit a desired base within a polynucleotide, and are less likely to edit bases that are not intended to be altered (e.g., “bystanders”).

[0673] In some embodiments, any of the base editing system comprising one of the ABE8 base editor variants described herein has reduced bystander editing or mutations. In some embodiments, an unintended editing or mutation is a bystander mutation or bystander editing, for example, base editing of a target base (e.g., A or C) in an unintended or non-target position in a target window of a target nucleotide sequence. In some embodiments, any of the base editing system comprising one of the ABE8 base editor variants described herein has reduced bystander editing or mutations compared to a base editor system comprising an ABE7 base editor, e.g., ABE7.10. In some embodiments, any of the base editing system comprising one of the ABE8 base editor variants described herein has reduced bystander editing or mutations by at least 1%, at least 2%, at least 3%, at least 4%, at least 5%, at least 10%, at least 15%, at least 20%, at least 25%, at least 30%, at least 35%, at least 40%, at least 45%, at least 50%, at least 55%, at least 60%, at least 65%, at least 70%, at least 75%, at least 80%, at least 85%, at least 90%, at least 95%, or at least 99% compared to a base editor system comprising an ABE7 base editor, e.g., ABE7.10. In some embodiments, any of the base editing system comprising one of the ABE8 base editor variants described herein has reduced bystander editing or mutations by at least 1.1 fold, at least 1.2 fold, at least 1.3 fold, at least 1.4 fold, at least 1.5 fold, at least 1.6 fold, at least 1.7 fold, at least 1.8 fold, at least 1.9 fold, at least 2.0 fold, at least 2.1 fold, at least 2.2 fold, at least 2.3 fold, at least 2.4 fold, at least 2.5 fold, at least 2.6 fold, at least 2.7 fold, at least 2.8 fold, at least 2.9 fold, or at least 3.0 fold compared to a base editor system comprising an ABE7 base editor, e.g., ABE7.10.

[0674] In some embodiments, any of the base editing system comprising one of the ABE8 base editor variants described herein has reduced spurious editing. In some embodiments, an unintended editing or mutation is a spurious mutation or spurious editing, for example, non-specific editing or guide independent editing of a target base (e.g., A or C) in an unintended or non-target region of the genome. In some embodiments, any of the base editing system comprising one of the ABE8 base editor variants described herein has reduced spurious editing compared to a base editor system comprising an ABE7 base editor, e.g., ABE7.10. In some embodiments, any of the base editing system comprising one of the ABE8 base editor variants described herein has reduced spurious editing by at least 1%, at least 2%, at least 3%, at least 4%, at least 5%, at least 10%, at least 15%, at least 20%, at least 25%, at least 30%, at least 35%, at least 40%, at least 45%, at least 50%, at least 55%, at least 60%, at least 65%, at least 70%, at least 75%, at least 80%, at least 85%, at least 90%, at least 95%, or at least 99% compared to a base editor system comprising an ABE7 base editor, e.g., ABE7.10. In some embodiments, any of the base editing system comprising one of the ABE8 base editor variants described herein has reduced spurious editing by at least 1.1 fold, at least 1.2 fold, at least 1.3 fold, at least 1.4 fold, at least 1.5 fold, at least 1.6 fold, at least 1.7 fold, at least 1.8 fold, at least 1.9 fold, at least 2.0 fold, at least 2.1 fold, at least 2.2 fold, at least 2.3 fold, at least 2.4 fold, at least 2.5 fold, at least 2.6 fold, at least 2.7 fold, at least 2.8 fold, at least 2.9 fold, or at least 3.0 fold compared to a base editor system comprising an ABE7 base editor, e.g., ABE7.10.

[0675] In some embodiments, any of the ABE8 base editor variants described herein have at least 0.01%, at least 1%, at least 2%, at least 3%, at least 4%, at least 5%, at least 10%, at least 15%, at least 20%, at least 25%, at least 30%, at least 35%, at least 40%, at least 45%, at least 50%, at least 55%, at least 60%, at least 65%, at least 70%, at least 75%, at least 80%, at least 85%, at least 90%, at least 95%, or at least 99% base editing efficiency. In some embodiments, the base editing efficiency may be measured by calculating the percentage of edited nucleobases in a population of cells. In some embodiments, any of the ABE8 base editor variants described herein have base editing efficiency of at least 0.01%, at least 1%, at least 2%, at least 3%, at least 4%, at least 5%, at least 10%, at least 15%, at least 20%, at least 25%, at least 30%, at least 35%, at least 40%, at least 45%, at least 50%, at least 55%, at least 60%, at least 65%, at least 70%, at least 75%, at least 80%, at least 85%, at least 90%, at least 95%, or at least 99% as measured by edited nucleobases in a population of cells.

[0676] In some embodiments, any of the ABE8 base editor variants described herein has higher base editing efficiency compared to the ABE7 base editors. In some embodiments, any of the ABE8 base editor variants described herein have at least 1%, at least 2%, at least 3%, at least 4%, at least 5%, at least 10%, at least 15%, at least 20%, at least 25%, at least 30%, at least 35%, at least 40%, at least 45%, at least 50%, at least 55%, at least 60%, at least 65%, at least 70%, at least 75%, at least 80%, at least 85%, at least 90%, at least 95%, at least 99%, at least 100%, at least 105%, at least 110%, at least 115%, at least 120%, at least 125%, at least 130%, at least 135%, at least 140%, at least 145%, at least 150%, at least 155%, at least 160%, at least 165%, at least 170%, at least 175%, at least 180%, at least 185%, at least 190%, at least 195%, at least 200%, at least 210%, at least 220%, at least 230%, at least 240%, at least 250%, at least 260%, at least 270%, at least 280%, at least 290%, at least 300%, at least 310%, at least 320%, at least 330%, at least 340%, at least 350%, at least 360%, at least 370%, at least 380%, at least 390%, at least 400%, at least 450%, or at least 500% higher base editing efficiency compared to an ABE7 base editor, e.g., ABE7.10.

[0677] In some embodiments, any of the ABE8 base editor variants described herein has at least 1.1 fold, at least 1.2 fold, at least 1.3 fold, at least 1.4 fold, at least 1.5 fold, at least 1.6 fold, at least 1.7 fold, at least 1.8 fold, at least 1.9 fold, at least 2.0 fold, at least 2.1 fold, at least 2.2 fold, at least 2.3 fold, at least 2.4 fold, at least 2.5 fold, at least 2.6 fold, at least 2.7 fold, at least 2.8 fold, at least 2.9 fold, at least 3.0 fold, at least 3.1 fold, at least 3.2, at least 3.3 fold, at least 3.4 fold, at least 3.5 fold, at least 3.6 fold, at least 3.7 fold, at least 3.8 fold, at least 3.9 fold, at least 4.0 fold, at least 4.1 fold, at least 4.2 fold, at least 4.3 fold, at least 4.4 fold, at least 4.5 fold, at least 4.6 fold, at least 4.7 fold, at least 4.8 fold, at least 4.9 fold, or at least 5.0 fold higher base editing efficiency compared to an ABE7 base editor, e.g., ABE7.10.

[0678] In some embodiments, any of the ABE8 base editor variants described herein have at least 0.01%, at least 1%, at least 2%, at least 3%, at least 4%, at least 5%, at least 10%, at least 15%, at least 20%, at least 25%, at least 30%, at least 35%, at least 40%, at least 45%, at least 50%, at least 55%, at least 60%, at least 65%, at least 70%, at least 75%, at least 80%, at least 85%, at least 90%, at least 95%, or at least 99% on-target base editing efficiency. In some embodiments, any of the ABE8 base editor variants described herein have on-target base editing efficiency of at least 0.01%, at least 1%, at least 2%, at least 3%, at least 4%, at least 5%, at least 10%, at least 15%, at least 20%, at least 25%, at least 30%, at least 35%, at least 40%, at least 45%, at least 50%, at least 55%, at least 60%, at least 65%, at least 70%, at least 75%, at least 80%, at least 85%, at least 90%, at least 95%, or at least 99% as measured by edited target nucleobases in a population of cells.

[0679] In some embodiments, any of the ABE8 base editor variants described herein has higher on-target base editing efficiency compared to the ABE7 base editors. In some embodiments, any of the ABE8 base editor variants described herein have at least 1%, at least 2%, at least 3%, at least 4%, at least 5%, at least 10%, at least 15%, at least 20%, at least 25%, at least 30%, at least 35%, at least 40%, at least 45%, at least 50%, at least 55%, at least 60%, at least 65%, at least 70%, at least 75%, at least 80%, at least 85%, at least 90%, at least 95%, at least 99%, at least 100%, at least 105%, at least 110%, at least 115%, at least 120%, at least 125%, at least 130%, at least 135%, at least 140%, at least 145%, at least 150%, at least 155%, at least 160%, at least 165%, at least 170%, at least 175%, at least 180%, at least 185%, at least 190%, at least 195%, at least 200%, at least 210%, at least 220%, at least 230%, at least 240%, at least 250%, at least 260%, at least 270%, at least 280%, at least 290%, at least 300%, at least 310%, at least 320%, at least 330%, at least 340%, at least 350%, at least 360%, at least 370%, at least 380%, at least 390%, at least 400%, at least 450%, or at least 500% higher on-target base editing efficiency compared to an ABE7 base editor, e.g., ABE7.10.

[0680] In some embodiments, any of the ABE8 base editor variants described herein has at least 1.1 fold, at least 1.2 fold, at least 1.3 fold, at least 1.4 fold, at least 1.5 fold, at least 1.6 fold, at least 1.7 fold, at least 1.8 fold, at least 1.9 fold, at least 2.0 fold, at least 2.1 fold, at least 2.2 fold, at least 2.3 fold, at least 2.4 fold, at least 2.5 fold, at least 2.6 fold, at least 2.7 fold, at least 2.8 fold, at least 2.9 fold, at least 3.0 fold, at least 3.1 fold, at least 3.2 fold, at least 3.3 fold, at least 3.4 fold, at least 3.5 fold, at least 3.6 fold, at least 3.7 fold, at least 3.8 fold, at least 3.9 fold, at least 4.0 fold, at least 4.1 fold, at least 4.2 fold, at least 4.3 fold, at least 4.4 fold, at least 4.5 fold, at least 4.6 fold, at least 4.7 fold, at least 4.8 fold, at least 4.9 fold, or at least 5.0 fold higher on-target base editing efficiency compared to an ABE7 base editor, e.g., ABE7.10.

[0681] The ABE8 base editor variants described herein may be delivered to a host cell via a plasmid, a vector, a LNP complex, or an mRNA. In some embodiments, any of the ABE8 base editor variants described herein is delivered to a host cell as an mRNA. In some embodiments, an ABE8 base editor delivered via a nucleic acid based delivery system, e.g., an mRNA, has on-target editing efficiency of at least at least 1%, at least 2%, at least 3%, at least 4%, at least 5%, at least 10%, at least 15%, at least 20%, at least 25%, at least 30%, at least 35%, at least 40%, at least 45%, at least 50%, at least 55%, at least 60%, at least 65%, at least 70%, at least 75%, at least 80%, at least 85%, at least 90%, at least 95%, or at least 99% as measured by edited nucleobases. In some embodiments, an ABE8 base editor delivered by an mRNA system has higher base editing efficiency compared to an ABE8 base editor delivered by a plasmid or vector system. In some embodiments, any of the ABE8 base editor variants described herein has at least 1%, at least 2%, at least 3%, at least 4%, at least 5%, at least 10%, at least 15%, at least 20%, at least 25%, at least 30%, at least 35%, at least 40%, at least 45%, at least 50%, at least 55%, at least 60%, at least 65%, at least 70%, at least 75%, at least 80%, at least 85%, at least 90%, at least 95%, at least 99%, at least 100%, at least 105%, at least 110%, at least 115%, at least 120%, at least 125%, at least 130%, at least 135%, at least 140%, at least 145%, at least 150%, at least 155%, at least 160%, at least 165%, at least 170%, at least 175%, at least 180%, at least 185%, at least 190%, at least 195%, at least 200%, at least 210%, at least 220%, at least 230%, at least 240%, at least 250%, at least 260%, at least 270%, at least 280%, at least 290%, at least 300% higher, at least 310%, at least 320%, at least 330%, at least 340%, at least 350%, at least 360%, at least 370%, at least 380%, at least 390%, at least 400%, at least 450%, or at least 500% on-target editing efficiency when delivered by an mRNA system compared to when delivered by a plasmid or vector system. In some embodiments, any of the ABE8 base editor variants described herein has at least 1.1 fold, at least 1.2 fold, at least 1.3 fold, at least 1.4 fold, at least 1.5 fold, at least 1.6 fold, at least 1.7 fold, at least 1.8 fold, at least 1.9 fold, at least 2.0 fold, at least 2.1 fold, at least 2.2 fold, at least 2.3 fold, at least 2.4 fold, at least 2.5 fold, at least 2.6 fold, at least 2.7 fold, at least 2.8 fold, at least 2.9 fold, at least 3.0 fold, at least 3.1 fold, at least 3.2 fold, at least 3.3 fold, at least 3.4 fold, at least 3.5 fold, at least 3.6 fold, at least 3.7 fold, at least 3.8 fold, at least 3.9 fold, at least 4.0 fold, at least 4.1 fold, at least 4.2 fold, at least 4.3 fold, at least 4.4 fold, at least 4.5 fold, at least 4.6 fold, at least 4.7 fold, at least 4.8 fold, at least 4.9 fold, or at least 5.0 fold higher on-target editing efficiency when delivered by an mRNA system compared to when delivered by a plasmid or vector system.

[0682] In some embodiments, any of base editor systems comprising one of the ABE8 base editor variants described herein result in less than 50%, less than 40%, less than 30%, less than 20%, less than 19%, less than 18%, less than 17%, less than 16%, less than 15%, less than 14%, less than 13%, less than 12%, less than 11%, less than 10%, less than 9%, less than 8%, less than 7%, less than 6%, less than 5%, less than 4%, less than 3%, less than 2%, less than 1%, less than 0.9%, less than 0.8%, less than 0.7%, less than 0.6%, less than 0.5%, less than 0.4%, less than 0.3%, less than 0.2%, less than 0.1%, less than 0.09%, less than 0.08%, less than 0.07%, less than 0.06%, less than 0.05%, less than 0.04%, less than 0.03%, less than 0.02%, or less than 0.01% off-target editing in the target polynucleotide sequence.

[0683] In some embodiments, any of the ABE8 base editor variants described herein has lower guided off-target editing efficiency when delivered by an mRNA system compared to when delivered by a plasmid or vector system. In some embodiments, any of the ABE8 base editor variants described herein has at least 1%, at least 2%, at least 3%, at least 4%, at least 5%, at least 10%, at least 15%, at least 20%, at least 25%, at least 30%, at least 35%, at least 40%, at least 45%, at least 50%, at least 55%, at least 60%, at least 65%, at least 70%, at least 75%, at least 80%, at least 85%, at least 90%, at least 95%, or at least 99% lower guided off-target editing efficiency when delivered by an mRNA system compared to when delivered by a plasmid or vector system. In some embodiments, any of the ABE8 base editor variants described herein has at least 1.1 fold, at least 1.2 fold, at least 1.3 fold, at least 1.4 fold, at least 1.5 fold, at least 1.6 fold, at least 1.7 fold, at least 1.8 fold, at least 1.9 fold, at least 2.0 fold, at least 2.1 fold, at least 2.2 fold, at least 2.3 fold, at least 2.4 fold, at least 2.5 fold, at least 2.6 fold, at least 2.7 fold, at least 2.8 fold, at least 2.9 fold, or at least 3.0 fold lower guided off-target editing efficiency when delivered by an mRNA system compared to when delivered by a plasmid or vector system. In some embodiments, any of the ABE8 base editor variants described herein has at least about 2.2 fold decrease in guided off-target editing efficiency when delivered by an mRNA system compared to when delivered by a plasmid or vector system.

[0684] In some embodiments, any of the ABE8 base editor variants described herein has lower guide-independent off-target editing efficiency when delivered by an mRNA system compared to when delivered by a plasmid or vector system. In some embodiments, any of the ABE8 base editor variants described herein has at least 1%, at least 2%, at least 3%, at least 4%, at least 5%, at least 10%, at least 15%, at least 20%, at least 25%, at least 30%, at least 35%, at least 40%, at least 45%, at least 50%, at least 55%, at least 60%, at least 65%, at least 70%, at least 75%, at least 80%, at least 85%, at least 90%, at least 95%, or at least 99% lower guide-independent off-target editing efficiency when delivered by an mRNA system compared to when delivered by a plasmid or vector system. In some embodiments, any of the ABE8 base editor variants described herein has at least 1.1 fold, at least 1.2 fold, at least 1.3 fold, at least 1.4 fold, at least 1.5 fold, at least 1.6 fold, at least 1.7 fold, at least 1.8 fold, at least 1.9 fold, at least 2.0 fold, at least 2.1 fold, at least 2.2 fold, at least 2.3 fold, at least 2.4 fold, at least 2.5 fold, at least 2.6 fold, at least 2.7 fold, at least 2.8 fold, at least 2.9 fold, at least 3.0 fold, at least 5.0 fold, at least 10.0 fold, at least 20.0 fold, at least 50.0 fold, at least 70.0 fold, at least 100.0 fold, at least 120.0 fold, at least 130.0 fold, or at least 150.0 fold lower guide-independent off-target editing efficiency when delivered by an mRNA system compared to when delivered by a plasmid or vector system. In some embodiments, ABE8 base editor variants described herein has 134.0 fold decrease in guide-independent off-target editing efficiency (e.g., spurious RNA deamination) when delivered by an mRNA system compared to when delivered by a plasmid or vector system. In some embodiments, ABE8 base editor variants described herein does not increase guide-independent mutation rates across the genome.

[0685] In some embodiments, a single gene delivery event (e.g., by transduction, transfection, electroporation or any other method) can be used to target base editing of 5 sequences within a cell's genome. In some embodiments, a single gene delivery event can be used to target base editing of 6 sequences within a cell's genome. In some embodiments, a single gene delivery event can be used to target base editing of 7 sequences within a cell's genome. In some embodiments, a single electroporation event can be used to target base editing of 8 sequences within a cell's genome. In some embodiments, a single gene delivery event can be used to target base editing of 9 sequences within a cell's genome. In some embodiments, a single gene delivery event can be used to target base editing of 10 sequences within a cell's genome. In some embodiments, a single gene delivery event can be used to target base editing of 20 sequences within a cell's genome. In some embodiments, a single gene delivery event can be used to target base editing of 30 sequences within a cell's genome. In some embodiments, a single gene delivery event can be used to target base editing of 40 sequences within a cell's genome. In some embodiments, a single gene delivery event can be used to target base editing of 50 sequences within a cell's genome.

[0686] In some embodiments, the method described herein, for example, the base editing methods has minimum to no off-target effects.

[0687] In some embodiments, the base editing method described herein results in at least 50% of a cell population that have been successfully edited (i.e., cells that have been successfully engineered). In some embodiments, the base editing method described herein results in at least 55% of a cell population that have been successfully edited. In some embodiments, the base editing method described herein results in at least 60% of a cell population that have been successfully edited. In some embodiments, the base editing method described herein results in at least 65% of a cell population that have been successfully edited. In some embodiments, the base editing method described herein results in at least 70% of a cell population that have been successfully edited. In some embodiments, the base editing method described herein results in at least 75% of a cell population that have been successfully edited. In some embodiments, the base editing method described herein results in at least 80% of a cell population that have been successfully edited. In some embodiments, the base editing method described herein results in at least 85% of a cell population that have been successfully edited. In some embodiments, the base editing method described herein results in at least 90% of a cell population that have been successfully edited. In some embodiments, the base editing method described herein results in at least 95% of a cell population that have been successfully edited. In some embodiments, the base editing method described herein results in about 91%, 92%, 93%, 94%, 95%, 96%, 97%, 98%, 99% or 100% of a cell population that have been successfully edited.

[0688] In some embodiments, the live cell recovery following a base editing intervention is greater than at least 60%, 70%, 80%, 90% of the starting cell population at the time of the base editing event. In some embodiments, the live cell recovery as described above is about 70%. In some embodiments, the live cell recovery as described above is about 75%. In some embodiments, the live cell recovery as described above is about 80%. In some embodiments, the live cell recovery as described above is about 85%. In some embodiments, the live cell recovery as described above is about 90%, or about 91%, 92%, 93%, 94% 95%, 96%, 97%, 98%, or 99%, or 100% of the cells in the population at the time of the base editing event.

[0689] In some embodiments the engineered cell population can be further expanded in vitro by about 2 fold, about 3-fold, about 4-fold, about 5-fold, about 6-fold, about 7-fold, about 8-fold, about 9-fold, about 10-fold, about 15-fold, about 20-fold, about 25-fold, about 30-fold, about 35-fold, about 40-fold, about 45-fold, about 50-fold, or about 100-fold.

[0690] The number of intended mutations and indels can be determined using any suitable method, for example, as described in International PCT Application Nos. PCT/2017/045381 (WO2018/027078) and PCT/US2016/058344 (WO2017/070632); Komor, A. C., et al., “Programmable editing of a target base in genomic DNA without double-stranded DNA cleavage” Nature 533, 420-424 (2016); Gaudelli, N. M., et al., “Programmable base editing of A•T to G•C in genomic DNA without DNA cleavage” Nature 551, 464-471 (2017); and Komor, A. C., et al., “Improved base excision repair inhibition and bacteriophage Mu Gam protein yields C:G-to-T:A base editors with higher efficiency and product purity” Science Advances 3:eaao4774 (2017); the entire contents of which are hereby incorporated by reference.

[0691] In some embodiments, to calculate indel frequencies, sequencing reads are scanned for exact matches to two 10-bp sequences that flank both sides of a window in which indels can occur. If no exact matches are located, the read is excluded from analysis. If the length of this indel window exactly matches the reference sequence the read is classified as not containing an indel. If the indel window is two or more bases longer or shorter than the reference sequence, then the sequencing read is classified as an insertion or deletion, respectively. In some embodiments, the base editors provided herein can limit formation of indels in a region of a nucleic acid. In some embodiments, the region is at a nucleotide targeted by a base editor or a region within 2, 3, 4, 5, 6, 7, 8, 9, or 10 nucleotides of a nucleotide targeted by a base editor.

[0692] The number of indels formed at a target nucleotide region can depend on the amount of time a nucleic acid (e.g., a nucleic acid within the genome of a cell) is exposed to a base editor. In some embodiments, the number or proportion of indels is determined after at least 1 hour, at least 2 hours, at least 6 hours, at least 12 hours, at least 24 hours, at least 36 hours, at least 48 hours, at least 3 days, at least 4 days, at least 5 days, at least 7 days, at least 10 days, or at least 14 days of exposing the target nucleotide sequence (e.g., a nucleic acid within the genome of a cell) to a base editor. It should be appreciated that the characteristics of the base editors as described herein can be applied to any of the fusion proteins, or methods of using the fusion proteins provided herein.

[0693] Details of base editor efficiency are described in International PCT Application Nos. PCT/2017/045381 (WO 2018/027078) and PCT/US2016/058344 (WO 2017/070632), each of which is incorporated herein by reference for its entirety. Also see Komor, A. C., et al., “Programmable editing of a target base in genomic DNA without double-stranded DNA cleavage” Nature 533, 420-424 (2016); Gaudelli, N. M., et al., “Programmable base editing of A•T to G•C in genomic DNA without DNA cleavage” Nature 551, 464-471 (2017); and Komor, A. C., et al., “Improved base excision repair inhibition and bacteriophage Mu Gam protein yields C:G-to-T:A base editors with higher efficiency and product purity” Science Advances 3:eaao4774 (2017), the entire contents of which are hereby incorporated by reference. In some embodiments, editing of a plurality of nucleobase pairs in one or more genes using the methods provided herein results in formation of at least one intended mutation. In some embodiments, said formation of said at least one intended mutation results in the disruption the normal function of a gene. In some embodiments, said formation of said at least one intended mutation results decreases or eliminates the expression of a protein encoded by a gene. It should be appreciated that multiplex editing can be accomplished using any method or combination of methods provided herein.

### Engineered Nucleases

[0694] In some embodiments, the gene editing system comprises an engineered nuclease (e.g., meganuclease, zinc finger nuclease (ZFN), Transcription activator-like effector nuclease (TALEN), or a Cas nuclease. In some embodiments, the gene editing system comprises a ZFN. ZFNs are fusion proteins comprising a zinc-finger DNA binding domain (“ZF”) and a nuclease domain. Each naturally-occurring ZF may bind to three consecutive base pairs (a DNA triplet), and ZF repeats are combined to recognize a DNA target sequence and provide sufficient affinity. Thus, engineered ZF repeats are combined to recognize longer DNA sequences, such as, e.g., 9 base pairs, 12 base pairs, 15 base pairs, 18 base pairs, etc. In some embodiments, the ZFN comprise ZFs fused to a nuclease domain from a restriction endonuclease (e.g., FokI). In some embodiments, the nuclease domain comprises a dimerization domain, such as when the nuclease dimerizes to be active, and a pair of ZFNs comprising the ZF repeats and the nuclease domain is designed for targeting a target sequence, which comprises two half target sequences recognized by each ZF repeats on opposite strands of the DNA molecule, with an interconnecting sequence in between (which is sometimes called a spacer in the literature). For example, the interconnecting sequence is 5 to 7 basepairs in length. When both ZFNs of the pair bind, the nuclease domain may dimerize and introduce a DSB within the interconnecting sequence. In some embodiments, the dimerization domain of the nuclease domain comprises a knob-into-hole motif to promote dimerization.

[0695] In some embodiments, the gene editing system comprises a TALEN. The DNA binding domain of TALENs usually comprises a variable number of 34 or 35 amino acid repeats (“modules” or “TAL modules”), with each module binding to a single DNA base pair, A, T, G, or C. Adjacent residues at positions 12 and 13 (the “repeat-variable di-residue” or RVD) of each module specify the single DNA base pair that the module binds to. In some embodiments, the TALEN may comprise a nuclease domain from a restriction endonuclease (e.g., FokI). In some embodiments, the nuclease domain may dimerize to be active, and a pair of TALENS is designed for targeting a target sequence, which comprises two half target sequences recognized by each DNA binding domain on opposite strands of the DNA molecule, with an interconnecting sequence in between. For example, each half target sequence is in the range of 10 to 20 base pairs, and the interconnecting sequence is 12 to 19 base pairs in length. When both TALENs of the pair bind, the nuclease domain may dimerize and introduce a double strand break within the interconnecting sequence. In some embodiments, the dimerization domain of the nuclease domain may comprise a knob-into-hole motif to promote dimerization.

[0696] In some embodiments, the gene editing system comprises a meganuclease. Naturally-occurring meganucleases recognize and cleave double-stranded DNA sequences of about 12 to 40 base pairs and are commonly grouped into five families. In some embodiments, the meganuclease is chosen from the LAGLIDADG family, the GIY-YIG family, the HNH family, the His-Cys box family, and the PD-(D/E)XK family. In some embodiments, the DNA binding domain of the meganuclease is engineered to recognize and bind to a sequence other than its cognate target sequence. In some embodiments, the DNA binding domain of the meganuclease is fused to a heterologous nuclease domain. In some embodiments, the meganuclease, such as a homing endonuclease, are fused to TAL modules to create a hybrid protein, such as a “megaTAL” protein. The megaTAL proteins can have improved DNA targeting specificity by recognizing the target sequences of both the DNA binding domain of the meganuclease and the TAL modules.

### G. PHARMACEUTICAL COMPOSITIONS AND FORMULATIONS

[0697] Provided herein are compositions (e.g., pharmaceutical compositions) comprising any of the recombinant rabies virus genomes and recombinant rabies viruses described herein. The term “pharmaceutical composition,” as used herein, refers to a composition formulated for pharmaceutical use. In certain embodiments, the pharmaceutical composition further comprises a pharmaceutically acceptable carrier. In certain embodiments, the pharmaceutical composition comprises additional agents (e.g., for specific delivery, increasing half-life, or other therapeutic compounds).

[0698] As used herein, the term “pharmaceutically-acceptable carrier” refers to a pharmaceutically-acceptable material, composition, or vehicle, such as a liquid or solid filler, diluent, excipient, manufacturing aid (e.g., lubricant, talc magnesium, calcium or zinc stearate, or steric acid), or solvent encapsulating material, involved in carrying or transporting the compound (e.g., a recombinant rabies virus genome or recombinant rabies virus described herein) from one site (e.g., the delivery site) of the body, to another site (e.g., a target organ, tissue, or portion of the body). A pharmaceutically acceptable carrier is “acceptable” in the sense of being compatible with the other ingredients of the formulation and not injurious to the tissue of the subject (e.g., physiologically compatible, sterile, physiologic pH, etc.).

[0699] Some nonlimiting examples of materials which can serve as pharmaceutically-acceptable carriers include: (1) sugars, such as lactose, glucose and sucrose; (2) starches, such as corn starch and potato starch; (3) cellulose, and its derivatives, such as sodium carboxymethyl cellulose, methylcellulose, ethyl cellulose, microcrystalline cellulose and cellulose acetate; (4) powdered tragacanth; (5) malt; (6) gelatin; (7) lubricating agents, such as magnesium stearate, sodium lauryl sulfate and talc; (8) excipients, such as cocoa butter and suppository waxes; (9) oils, such as peanut oil, cottonseed oil, safflower oil, sesame oil, olive oil, corn oil and soybean oil; (10) glycols, such as propylene glycol; (11) polyols, such as glycerin, sorbitol, mannitol and polyethylene glycol (PEG); (12) esters, such as ethyl oleate and ethyl laurate; (13) agar; (14) buffering agents, such as magnesium hydroxide and aluminum hydroxide; (15) alginic acid; (16) pyrogen-free water; (17) isotonic saline; (18) Ringer's solution; (19) ethyl alcohol; (20) pH buffered solutions; (21) polyesters, polycarbonates and/or polyanhydrides; (22) bulking agents, such as polypeptides and amino acids (23) serum alcohols, such as ethanol; and (23) other non-toxic compatible substances employed in pharmaceutical formulations. Wetting agents, coloring agents, release agents, coating agents, sweetening agents, flavoring agents, perfuming agents, preservative and antioxidants can also be present in the formulation. The terms such as “excipient,” “carrier,” “pharmaceutically acceptable carrier,” “vehicle,” or the like are used interchangeably herein.

[0700] Pharmaceutical compositions can comprise one or more pH buffering compounds to maintain the pH of the formulation at a predetermined level that reflects physiological pH, such as in the range of about 5.0 to about 8.0. The pH buffering compound used in the aqueous liquid formulation can be an amino acid, such as histidine, or a mixture of amino acids, such as histidine and glycine. Alternatively, the pH buffering compound is preferably an agent which maintains the pH of the formulation at a predetermined level, such as in the range of about 5.0 to about 8.0, and which does not chelate calcium ions. Illustrative examples of such pH buffering compounds include, but are not limited to, imidazole and acetate ions. The pH buffering compound may be present in any amount suitable to maintain the pH of the formulation at a predetermined level.

[0701] Pharmaceutical compositions can also contain one or more osmotic modulating agents, i.e., a compound that modulates the osmotic properties (e.g., tonicity, osmolality, and/or osmotic pressure) of the formulation to a level that is acceptable to the blood stream and blood cells of recipient individuals. The osmotic modulating agent can be an agent that does not chelate calcium ions. The osmotic modulating agent can be any compound known or available to those skilled in the art that modulates the osmotic properties of the formulation. One skilled in the art may empirically determine the suitability of a given osmotic modulating agent for use in the inventive formulation. Illustrative examples of suitable types of osmotic modulating agents include, but are not limited to: salts, such as sodium chloride and sodium acetate; sugars, such as sucrose, dextrose, and mannitol; amino acids, such as glycine; and mixtures of one or more of these agents and/or types of agents. The osmotic modulating agent(s) may be present in any concentration sufficient to modulate the osmotic properties of the formulation.

[0702] In certain embodiments, the pharmaceutical composition is formulated for delivery to a subject, e.g., for gene therapy. Suitable routes of administrating the pharmaceutical composition described herein include, without limitation: topical, subcutaneous, transdermal, intradermal, intralesional, intraarticular, intraperitoneal, intravesical, transmucosal, gingival, intradental, intracochlear, transtympanic, intraorgan, epidural, intrathecal, intramuscular, intravenous, intravascular, intraosseus, periocular, intratumoral, intracerebral, and intracerebroventricular administration.

[0703] In certain embodiments, the pharmaceutical composition described herein is administered locally to a diseased site (e.g., tumor site). In certain embodiments, the pharmaceutical composition described herein is administered to a subject by injection, by means of a catheter, by means of a suppository, or by means of an implant, the implant being of a porous, non-porous, or gelatinous material, including a membrane, such as a silastic membrane, or a fiber.

[0704] In certain embodiments, the pharmaceutical composition described herein is delivered in a controlled release system. In certain embodiments, a pump can be used (see, e.g., Langer, 1990, Science 249: 1527-1533; Sefton, 1989, CRC Crit. Ref. Biomed. Eng. 14:201; Buchwald et al, 1980, Surgery 88:507; Saudek et al., 1989, N. Engl. J. Med. 321:574). In certain embodiments, polymeric materials can be used. See, e.g., Medical Applications of Controlled Release (Langer and Wise eds., CRC Press, Boca Raton, Fla., 1974); Controlled Drug Bioavailability, Drug Product Design and Performance (Smolen and Ball eds., Wiley, New York, 1984); Ranger and Peppas, 1983, Macromol. Sci. Rev. Macromol. Chem. 23:61. See, also, Levy et al, 1985, Science 228: 190; During et al, 1989, Ann. Neurol. 25:351; Howard et ah, 1989, J. Neurosurg. 71: 105. Other controlled release systems are discussed, for example, in Langer, supra.

[0705] In certain embodiments, the pharmaceutical composition is formulated in accordance with routine procedures as a composition adapted for intravenous or subcutaneous administration to a subject, e.g., a human. In certain embodiments, pharmaceutical compositions for administration by injection are solutions in sterile isotonic used as solubilizing agent and a local anesthetic such as lignocaine to ease pain at the site of the injection.

[0706] Generally, the ingredients are supplied either separately or mixed together in unit dosage form, for example, as a dry lyophilized powder or water free concentrate in a hermetically sealed container such as an ampoule or sachette indicating the quantity of active agent.

[0707] Where the pharmaceutical is to be administered by infusion, it can be dispensed with an infusion bottle containing sterile pharmaceutical grade water or saline. Where the pharmaceutical composition is administered by injection, an ampoule of sterile water for injection or saline can be provided so that the ingredients can be mixed prior to administration.

[0708] A pharmaceutical composition for systemic administration can be a liquid, e.g., sterile saline, lactated Ringer's or Hank's solution. In addition, the pharmaceutical composition can be in solid forms and re-dissolved or suspended immediately prior to use. Lyophilized forms are also contemplated. The pharmaceutical composition can be contained within a lipid particle or vesicle, such as a liposome or microcrystal, which is also suitable for parenteral administration. The particles can be of any suitable structure, such as unilamellar or plurilamellar, so long as compositions are contained therein. Compounds can be entrapped in “stabilized plasmid-lipid particles” (SPLP) containing the fusogenic lipid dioleoylphosphatidylethanolamine (DOPE), low levels (5-10 mol %) of cationic lipid, and stabilized by a polyethyleneglycol (PEG) coating (see, e.g., Zhang Y. P. et al., Gene Ther. 1999, 6: 1438-47). Positively charged lipids such as 1,2-dioleoyl-3-trimethylammonium-propane, or “DOTAP,” are particularly preferred for such particles and vesicles. The preparation of such lipid particles is well known. See, e.g., U.S. Pat. Nos. 4,880,635; 4,906,477; 4,911,928; 4,917,951; 4,920,016; and 4,921,757; each of which is incorporated herein by reference.

[0709] The pharmaceutical composition described herein can be administered or packaged as a unit dose. The term “unit dose” when used in reference to a pharmaceutical composition of the present disclosure refers to physically discrete units suitable as unitary dosage for the subject, each unit containing a predetermined quantity of active material calculated to produce the desired therapeutic effect in association with the required diluent; i.e., carrier, or vehicle.

[0710] Further, the pharmaceutical composition can be provided as a pharmaceutical kit comprising (a) a container containing a compound of the invention in lyophilized form and (b) a second container containing a pharmaceutically acceptable diluent (e.g., sterile, used for reconstitution or dilution of the lyophilized compound of the invention). Optionally associated with such containers) can be a notice in the form prescribed by a governmental agency regulating the manufacture, use or sale of pharmaceuticals or biological products, which notice reflects approval by the agency of manufacture, use or sale for human administration.

[0711] In another aspect, an article of manufacture containing materials useful for the treatment of the diseases described above is included. In certain embodiments, the article of manufacture comprises a container and a label. Suitable containers include, for example, bottles, vials, syringes, and test tubes. The containers can be formed from a variety of materials such as glass or plastic. In certain embodiments, the container holds a composition (e.g., a recombinant rabies virus genome or a recombinant rabies virus described herein) that is effective for treating a disease and can have a sterile access port. For example, the container can be an intravenous solution bag or a vial having a stopper pierceable by a hypodermic injection needle. The active agent in the composition is a compound (e.g., a recombinant rabies virus genome or a recombinant rabies virus) of the disclosure. In certain embodiments, the label on or associated with the container indicates that the composition is used for treating the disease of choice. The article of manufacture can further comprise a second container comprising a pharmaceutically-acceptable buffer, such as phosphate-buffered saline, Ringer's solution, or dextrose solution. It can further include other materials desirable from a commercial and user standpoint, including other buffers, diluents, filters, needles, syringes, and package inserts with instructions for use.

[0712] In some embodiments, any of the recombinant rabies virus genomes or recombinant rabies viruses described herein are provided as part of a pharmaceutical composition. In some embodiments, the pharmaceutical composition comprises any of the recombinant rabies virus genomes or recombinant rabies viruses described herein. In some embodiments, the pharmaceutical composition comprises any of the complexes provided herein.

[0713] In some embodiments, compositions provided herein are administered to a subject, for example, to a human subject, in order to effect a targeted genomic modification within the subject. In some embodiments, cells are obtained from the subject and contacted with any of the pharmaceutical compositions provided herein. In some embodiments, cells removed from a subject and contacted ex vivo with a pharmaceutical composition are re-introduced into the subject, optionally after the desired genomic modification has been effected or detected in the cells. Methods of delivering pharmaceutical compositions comprising nucleases are known, and are described, for example, in U.S. Pat. Nos. 6,453,242; 6,503,717; 6,534,261; 6,599,692; 6,607,882; 6,689,558; 6,824,978; 6,933,113; 6,979,539; 7,013,219; and 7,163,824, the disclosures of all of which are incorporated by reference herein in their entireties. Although the descriptions of pharmaceutical compositions provided herein are principally directed to pharmaceutical compositions which are suitable for administration to humans, it will be understood by the skilled artisan that such compositions are generally suitable for administration to animals or organisms of all sorts. Modification of pharmaceutical compositions suitable for administration to humans in order to render the compositions suitable for administration to various animals is well understood, and the ordinarily skilled veterinary pharmacologist can design and/or perform such modification with merely ordinary, if any, experimentation. Subjects to which administration of the pharmaceutical compositions is contemplated include, but are not limited to, humans and/or other primates; mammals, domesticated animals, pets, and commercially relevant mammals such as cattle, pigs, horses, sheep, cats, dogs, mice, and/or rats; and/or birds, including commercially relevant birds such as chickens, ducks, geese, and/or turkeys.

[0714] Formulations of the pharmaceutical compositions described herein may be prepared by any method known or hereafter developed in the art of pharmacology. In general, such preparatory methods include the step of bringing the active ingredient(s) into association with an excipient and/or one or more other accessory ingredients, and then, if necessary and/or desirable, shaping and/or packaging the product into a desired single- or multi-dose unit.

[0715] Pharmaceutical formulations may additionally comprise a pharmaceutically acceptable excipient, which, as used herein, includes any and all solvents, dispersion media, diluents, or other liquid vehicles, dispersion or suspension aids, surface active agents, isotonic agents, thickening or emulsifying agents, preservatives, solid binders, lubricants and the like, as suited to the particular dosage form desired. Remington's The Science and Practice of Pharmacy, 21st Edition, A. R. Gennaro (Lippincott, Williams & Wilkins, Baltimore, Md., 2006; incorporated in its entirety herein by reference) discloses various excipients used in formulating pharmaceutical compositions and known techniques for the preparation thereof. See also PCT application PCT/US2010/055131 (Publication number WO2011053982 A8, filed Nov. 2, 2010), incorporated in its entirety herein by reference, for additional suitable methods, reagents, excipients and solvents for producing pharmaceutical compositions comprising a nuclease. Except insofar as any conventional excipient medium is incompatible with a substance or its derivatives, such as by producing any undesirable biological effect or otherwise interacting in a deleterious manner with any other component(s) of the pharmaceutical composition, its use is contemplated to be within the scope of this disclosure. In certain embodiments, compositions in accordance with the present invention may be used for treatment of any of a variety of diseases, disorders, and/or conditions.

[0716] Various aspects of the present disclosure employs, unless otherwise indicated, conventional techniques of molecular biology (including recombinant techniques), microbiology, cell biology, biochemistry, and immunology, which are well within the purview of the skilled artisan. Such techniques are explained fully in the literature, such as, “Molecular Cloning: A Laboratory Manual”, second edition (Sambrook, 1989); “Oligonucleotide Synthesis” (Gait, 1984); “Animal Cell Culture” (Freshney, 1987); “Methods in Enzymology,” and “Handbook of Experimental Immunology” (Weir, 1996); “Gene Transfer Vectors for Mammalian Cells” (Miller and Calos, 1987); “Current Protocols in Molecular Biology” (Ausubel, 1987); “PCR: The Polymerase Chain Reaction”, (Mullis, 1994); “Current Protocols in Immunology” (Coligan, 1991). These techniques are applicable to the production of the various aspects of the present disclosure, and, as such, may be considered in making and practicing the same.

### H. POLYNUCLEOTIDES, VECTORS, AND CELLS

[0717] Provided herein are polynucleotides comprising: (i) a recombinant rabies virus genome described herein; (ii) an N gene encoding for a rabies virus nucleoprotein or a functional variant thereof; (iii) a P gene encoding for a rabies virus phosphoprotein or a functional variant thereof; (iv) an L gene encoding for a rabies virus polymerase (e.g., a RNA-dependent RNA polymerase) or a functional variant thereof; (v) a G gene encoding for a rabies virus glycoprotein or a functional variant thereof; and/or (vi) an M gene encoding for a rabies virus matrix protein or a functional variant thereof.

[0718] The polynucleotides described herein can be obtained by any method known in the art, such as by chemically synthesizing the DNA chain, by PCR, or by the Gibson Assembly method. The advantage of constructing a full-length DNA by chemical synthesis or a combination of PCR method or Gibson Assembly method is that the codons may be optimized to ensure that the fusion protein is expressed at a high level in a host cell. Optimized codons may be selected using the genetic code use frequency database (http://www.kazusa.or.jp/codon/index.html), which is disclosed in the home page of Kazusa DNA Research Institute. In certain embodiments, the polynucleotide is codon optimized. In certain embodimens, the polynucleotide can be obtimized by RNA optimization. Additional optimization methods can be included to increase stability for recombinant expression, including, e.g., replacement of signal sequences with exogenous signal sequences, removal of instability elements, removal of inhibitory regions, removal of potential splice sites, and other optimization methods known to those of ordinary skill in the art. See, e.g., U.S. Pat. No. 6,794,498, the disclosure of which is herein incorporated by reference in its entirety.

[0719] Once obtained, polynucleotides of the present disclosure may be incorporated into suitable expression vectors. Accordingly, the present disclosure also provides a vector comprising any of the polynucleotides disclosed herein, separately, or in combination. Suitable vectors include plasmids, viruses, artificial chromosomes, bacmids, cosmids, and others known to those of ordinary skill in the art. In certain embodiments, the vector is an expression vector.

[0720] Suitable expression vectors include Escherichia coli-derived plasmids (e.g., pBR322, pBR325, pUC12, pUC13); Bacillus subtilis-derived plasmids (e.g., pUB110, pTP5, pCI94); yeast-derived plasmids (e.g., pSH19, pSH15); plasmids suitable for expression in insect cells (e.g., pFast-Bac); plasmids suitable for expression in mammalian cells (e.g., pXTI, pRc/CMV, pRc/RSV, pcDNA1/Neo); also bacteriophages, such as lamda phage and the like; other vectors that may be used include insect viral vectors, such as baculovirus and the like (e.g., BmNPV, AcNPV); and viral vectors suitable for expression in a mammalian cell, such as retrovirus, vaccinia virus, adenovirus and the like.

[0721] The genes and/or transgenes comprises with the polynucleotides and vectors are typically expressed under the control of a transcriptional regulatory element. In certain embodiments, the transcriptional regulatory element can comprise one or more enhancer elements, intron elements, and/or promoter elements. In certain embodiments, the transcriptional regulatory element comprises a constitutive promoter. Examples of transcriptional regulatory elements include those that comprise a CMV promoter (promoter from human cytomegalovirus) optionally including a CMV enhancer, a EF1α promoter (promoter from human elongation factor 1 alpha), a CBA promoter (comprising a CMV early enhancer and a chicken β-actin promoter), a CAG promoter (comprising a CBA promoter and a rabbit β-globin intron), a CAGGS promoter (comprising a CMV enhancer, a CBA promoter, and chicken β-actin intron 1/exon 1), a PGK promoter (promoter from phosphoglycerate kinase), a U6 promoter (U6 nuclear promoter), a Ubc promoter (promoter from human ubiquitin C), a CASI promoter (comprising a CMV enhancer, a ubiquitin C enhancer, and a chicken β-actin promoter), and a CALM1 promoter (promoter from calmodulin 1). Various constitutive transcriptional regulatory elements are known to those of ordinary skill in the art.

[0722] In certain embodiments, the transcriptional regulatory element comprises an inducible promoter. For example, the transcripitional regulatory element can comprise the inducible TRE promoter (tetracyclin response element promoter). Such inducible promoters can be positive inducible, where the promoter is inactive because an activator protein cannot bind thereto, or negative inducible, wherein a repressor protein is bound thereto that prevents transcription. Examples of inducible promoters include those that are chemically inducible, e.g., a tetracycline ON (Tet-On) promoter system, a lac repressor system, a pBad prokaryotic promoter, and others such as alcohol or steroid regulated promoters. Inducible promoters can be temperature inducible, e.g., heat or cold induced promoters (e.g., Hsp70 or Hsp90-derived promoters), and light inducible, where light can be used to regulate transcription. In certain embodiments, the transcriptional regulatory element comprises a repressible promoter. Various inducible transcriptional regulatory elements are known to those of ordinary skill in the art.

[0723] In certain embodiments, the transcriptional regulatory element comprises an promoter exogenous to the gene or transgene. In certain embodiments, the transcriptional regulatory element comprises a synthetic promoter.

[0724] Suitable promoters may be chosen based on its use for expression in a desired host cell. For example, when the host is an animal cell, any one of the following promoters are used: SR-alpha promoter, SV40 promoter, LTR promoter, CMV (cytomegalovirus) promoter, RSV (Rous sarcoma virus) promoter, MoMuLV (Moloney mouse leukemia virus) LTR, HSV-TK (simple herpes virus thymidine kinase) promoter and the like are used. In certain embodiments, the promoter is CMV promoter or SR alpha promoter. In certain embodiments, the promoter is an elongation factor 1-alpha (EF1a) promoter. When the host cell is Escherichia coli, any of the following promoters may be used: trp promoter, lac promoter, recA promoter, lambdaPL promoter, Ipp promoter, T7 promoter and the like. When the host is genus Bacillus, any of the following promoters may be used: SPO1 promoter, SPO2 promoter, penP promoter and the like. When the host is a yeast, any of the following promoters may be used: Gal1/10 promoter, PHOS promoter, PGK promoter, GAP promoter, ADH promoter and the like. When the host is an insect cell, any of the following promoters may be used: polyhedrin promoter, P10 promoter and the like. When the host is a plant cell, any of the following promoters may be used: CaMV35S promoter, CaMVI9S promoter, NOS promoter and the like.

[0725] If desired, the expression vector also includes any one or more of an enhancer, splicing signal, terminator, polyadenylation signal, a selection marker (e.g., a drug resistance gene, auxotrophic complementary gene and the like), or a replication origin.

[0726] The polynucleotides of the present disclosure may be introduced into virtually any host cell of interest, including but not limited to bacteria, yeast, fungi, insects, plants, and animal cells using routine methods known to the skilled artisan.

[0727] The genus Escherichia includes Escherichia coli K12/DH1, Escherichia coli JM103, Escherichia coli JA221, Escherichia coli HB101, Escherichia coli C600 and the like. The genus Bacillus includes Bacillus subtilis MI 114, Bacillus subtilis 207-21, and the like.

[0728] Yeast useful for hosting the polynucleotides of the disclosure include Saccharomyces cerevisiae AH22, AH22 R⁻, NA87-11A, DKD-5D, 20B-12, Schizosaccharomyces pombe NCYC1913, NCYC2036, Pichia pastoris KM71, and the like.

[0729] Polynucleotides of the present disclosure may be introduced into insect cells using, for example, viral vectors, such as AcNPV. Insect host cells include any of the following cell lines: cabbage armyworm larva-derived established line (Spodoptera frugiperda cell; Sf cell), MG1 cells derived from the mid-intestine of Trichoplusiani, High Five, cells derived from an egg of Trichoplusiani, Mamestra brassicae-derived cells, Estigmena acraz-derived cells, and the like. When the virus is BmNPV, cells of a Bombyx mori-derived line (Bombyx mori N cell; BmN cell) and the like are used. Sf cells include, for example, Sf9 cells (ATCC CRL1711), Sf21s cells, and the like.

[0730] Mammalian cell lines may be used, including, without limitation monkey COS-7 cells, monkey Vero cells, Chinese hamster ovary (CHO) cells, dhfr gene-deficient CHO cells, mouse L cells, mouse AtT-20 cells, mouse myeloma cells, rat GH3 cells, human FL cells, human embryonic kidney (HEK) cells (e.g., HEK293, HEK293T), COS cells (e.g., COS1 or COS), BHK cells, MDCK cells, NS0 cells, PER. C6 cells, CRL7O3O cells, HsS78Bst cells, HeLa cells, NIH 3T3 cells, HepG2 cells, SP210 cells, R1.1 cells, B-W cells, L-M cells, BSC1 cells, BSC40 cells, YB/20 cells and BMT10 cells, and the like.

[0731] In certain embodiments, suitable cells are of a mammalian, a bacterial, or an insect origin. In certain embodiments, the cell is selected from the group consisting of a HEK293 cell, a HEK293T cells, a VERO cell, a BHK cell, and a BSR cell.

[0732] All the above-mentioned host cells may be haploid (monoploid), or polyploid (e.g., diploid, triploid, tetraploid and the like.

[0733] Various methods of introducing polynucleotides of the disclosure into a host cell described herein are known to those of ordinary skill in the art. For example, such methods may include the use of any transfection method known in the art (e.g., using lysozyme, PEG, CaCl2) coprecipitation, electroporation, microinjection, particle gun, lipofection, Agrobacterium and the like). The transfection method is selected based on the host cell to be transfected. Escherichia coli can be transformed according to the methods described in, for example, Proc. Natl. Acad. Sci. USA, 69, 2110 (1972), Gene, 17, 107 (1982) and the like. Methods for transducing the genus Bacillus are described in, for example, Molecular & General Genetics, 168, 111 (1979). Yeast cells are transduced using methods described in, for example, Methods in Enzymology, 194, 182-187 (1991), Proc. Natl. Acad. Sci. USA, 75, 1929 (1978) and the like. Insect cells are transfected using methods described in, for example, Bio/Technology, 6, 47-55 (1988) and the like. Mammalian cells are transfected using methods described in, for example, Cell Engineering additional volume 8, New Cell Engineering Experiment Protocol, 263-267 (1995) (published by Shujunsha), and Virology, 52, 456 (1973).

[0734] Cells comprising expression vectors of the present disclosure are cultured according to known methods, which vary depending on the host. For example, when Escherichia coli or genus Bacillus cells are cultured, a liquid medium is used. The medium preferably contains a carbon source, nitrogen source, inorganic substance and other components necessary for the growth of the transformant. Examples of the carbon source include glucose, dextrin, soluble starch, sucrose, and the like; examples of the nitrogen source include inorganic or organic substances such as ammonium salts, nitrate salts, corn steep liquor, peptone, casein, meat extract, soybean cake, potato extract, and the like; and examples of the inorganic substance include calcium chloride, sodium dihydrogen phosphate, magnesium chloride, and the like. The medium may also contain yeast extract, vitamins, growth promoting factors, and the like. The pH of the medium is preferably between about 5 to about 8. As a medium for culturing Escherichia coli, for example, M9 medium containing glucose and casamino acid (see, e.g., Journal of Experiments in Molecular Genetics, 431-433, Cold Spring Harbor Laboratory, New York 1972) is used. Escherichia coli is cultured at generally about 15 to about 43° C. Where necessary, aeration and stirring may be performed. The genus Bacillus is cultured at generally about 30 to about 40° C. Where necessary, aeration and stirring is performed.

[0735] Examples of medium suitable for culturing yeast include Burkholder minimum medium, SD medium containing 0.5% casamino acid, and the like. The pH of the medium is preferably about 5-about 8. The culture is performed at generally about 20° C. to about 35° C. Where necessary, aeration and stirring may be performed.

[0736] As a medium for culturing an insect cell or insect, Grace's Insect Medium containing an additive such as inactivated 10% bovine serum, and the like are used. The pH of the medium is preferably about 6.2 to about 6.4. Cells are cultured at about 27° C. Where necessary, aeration and stirring may be performed.

[0737] Mammalian cells are cultured, for example, in any one of minimum essential medium (MEM) containing about 5 to about 20% of fetal bovine serum, Dulbecco's modified Eagle medium (DMEM), RPMI 1640 medium, 199 medium, and the like. The pH of the medium is preferably about 6 to about 8. The culture is performed at about 30° C. to about 40° C. Where necessary, aeration and stirring may be performed.

### I. PACKAGING SYSTEMS AND METHODS THEREOF

[0738] The present disclosure provides packaging systems useful for the recombinant preparation of a rabies virus particle described herein. In particular, the packaging systems provide necessary components required for the preparation of a rabies virus particle described herein. In certain embodiments, the packaging system is useful for the recombinant preparation of a rabies virus particle comprising a recombinant rabies virus genome, wherein the genome lacks a G gene encoding for a rabies virus glycoprotein or a functional variant thereof; and/or the genome lacks an L gene encoding for a rabies virus polymerase or a functional variant thereof. In certain embodiments, the packaging system is useful for the recombinant preparation of a rabies virus particle comprising a recombinant rabies virus genome, wherein the genome lacks a G gene encoding for a rabies virus glycoprotein or a functional variant thereof. In certain embodiments, the packaging system is useful for the recombinant preparation of a rabies virus particle comprising a recombinant rabies virus genome, wherein the genome lacks a G gene encoding for a rabies virus glycoprotein or a functional variant thereof; and the genome lacks an L gene encoding for a rabies virus polymerase or a functional variant thereof.

[0739] The packaging systems described herein generally comprise or consist of: (i) an N gene encoding for a rabies virus nucleoprotein or a functional variant thereof; (ii) a P gene encoding for a rabies virus phosphoprotein or a functional variant thereof; and (iii) an L gene encoding for a rabies virus polymerase or a functional variant thereof. In certain embodiments, the packaging system further comprises an M gene encoding for a rabies virus matrix protein or a functional variant thereof. In certain embodiments, the packaging system further comprises a G gene encoding for a rabies virus glycoprotein or a functional variant thereof.

[0740] The N, P, and L genes of the packaging system can be provided in one or more vectors (e.g., transfecting plasmids). For example, the packaging system can comprise a separate transfecting plasmid for each of the N, P, and L genes, e.g., a first transfecting plasmid comprising an N gene encoding for a rabies virus nucleoprotein or a functional variant thereof; a second transfecting plasmid comprising a P gene encoding for a rabies virus phosphoprotein or a functional variant thereof; and a third transfecting plasmid comprising an L gene encoding for a rabies virus polymerase or a functional variant thereof. In certain embodiments, a single transfecting plasmid comprises two or more of the N, P, and L genes. For example, the packaging system can comprise a transfecting plasmid comprising an N gene encoding for a rabies virus nucleoprotein or a functional variant thereof, and a P gene encoding for a rabies virus phosphoprotein or a functional variant thereof; the packaging system can comprise a transfecting plasmid comprising an N gene encoding for a rabies virus nucleoprotein or a functional variant thereof, and an L gene encoding for a rabies virus polymerase or a functional variant thereof; the packaging system can comprise a transfecting plasmid comprising a P gene encoding for a rabies virus phosphoprotein or a functional variant thereof, and an L gene encoding for a rabies virus polymerase or a functional variant thereof. In certain embodiments, the packaging system can comprise a transfecting plasmid comprising an N gene encoding for a rabies virus nucleoprotein or a functional variant thereof, a P gene encoding for a rabies virus phosphoprotein or a functional variant thereof, and an L gene encoding for a rabies virus polymerase or a functional variant thereof.

[0741] The M and G genes of the packaging system can be provided in one or more transfecting plasmids. In certain embodiments, the packaging system comprises a separate transfecting plasmid for the M and G genes. For example, in certain embodiments, the packaging system can further comprise a transfecting plasmid comprising an M gene encoding for a rabies virus matrix protein or a functional variant thereof. In certain embodiments, the packaging system can further comprise a transfecting plasmid comprising a G gene encoding for a rabies virus glycoprotein or a functional variant thereof. The M and/or G gene can also be combined into a transfecting plasmid that comprises a N, P, and/or L gene as described herein. For example, a single transfecting plasmid can comprise an N gene encoding for a rabies virus nucleoprotein or a functional variant thereof, a P gene encoding for a rabies virus phosphoprotein or a functional variant thereof, an L gene encoding for a rabies virus polymerase or a functional variant thereof, an M gene encoding for a rabies virus matrix protein or a functional variant thereof, and a G gene encoding for a rabies virus glycoprotein or a functional variant thereof. Various other combinations can readily be appreciated by those of ordinary skill in the art.

[0742] The N, P, L, M, and/or G genes can all be under control of one or more transcriptional regulatory elements. In certain embodiments, the transcriptional regulatory element comprises a promoter and/or enhancer sequence. In certain embodiments, the transcriptional regulatory element comprises an EF1α promoter. Various promoters and/or enhancer sequences are known in the art and are described herein as examples, and one of ordinary skill in the art would be able to select a suitable promoter and/or enhancer sequence for their needs.

[0743] Where two or more of the N, P, L, M, and/or G genes reside on the same vector, the two or more genes may be present in one or more expression cassettes. For example, each of the N, P, L, M, and/or G genes can be within their own expression cassette each comprising a transcriptional regulatory element and/or transcriptional termination element.

[0744] Where two or more genes reside in the same expression cassette, the genes may be separated by a linker sequence. In certain embodiments, the linker sequence is a ribosomal skipping element comprising a nucleic acid sequence that encodes for an internal ribosome entry site (IRES). As used herein, “an internal ribosome entry site” or “IRES” refers to an element that promotes direct internal ribosome entry to the initiation codon, such as ATG, of a protein coding region, thereby leading to cap-independent translation of the gene. Various internal ribosome entry sites are known to those of skill in the art, including, without limitation, IRES obtainable from viral or cellular mRNA sources, e.g., immunogloublin heavy-chain binding protein (BiP); vascular endothelial growth factor (VEGF); fibroblast growth factor 2; insulin-like growth factor; translational initiation factor eIF4G; yeast transcription factors TFIID and HAP4; and IRES obtainable from, e.g., cardiovirus, rhinovirus, aphthovirus, HCV, Friend murine leukemia virus (FrMLV), and Moloney murine leukemia virus (MoMLV). In certain embodiments, the linker sequence is a ribosomal skipping element comprising a nucleic acid sequence that encodes for a self-cleaving peptide. As used herein, a “self-cleaving peptide” or “2A peptide” refers to an oligopeptide that allow multiple proteins to be encoded as polyproteins, which dissociate into component proteins upon translation. Use of the term “self-cleaving” is not intended to imply a proteolytic cleavage reaction. Various self-cleaving or 2A peptides are known to those of skill in the art, including, without limitation, those found in members of the Picornaviridae virus family, e.g., foot-and-mouth disease virus (FMDV), equine rhinitis A virus (ERAV0, Thosea asigna virus (TaV), and porcine tescho virus-1 (PTV-1); and carioviruses such as Theilovirus and encephalomyocarditis viruses. 2A peptides derived from FMDV, ERAV, PTV-1, and TaV are referred to herein as “F2A,” “E2A,” “P2A,” and “T2A,” respectively. Those of skill in the art would be able to select the appropriate linker sequence for their needs.

[0745] In certain embodiments, a single vector (e.g., transfecting plasmid) comprises a first expression cassette comprising the N and P genes, and a second expression cassette comprising the L gene. In certain embodiments, the first expression cassette comprises from 5′ to 3′: a transcriptional regulatory element; the P gene; and the N gene. In certain embodiments, the first expression cassette comprises from 5′ to 3′: a transcriptional regulatory element; the P gene; a ribosomal skipping element; and the N gene. In certain embodiments, the second expression cassette comprises from 5′ to 3′: a transcriptional regulatory element; and the L gene. In certain embodiments, the first expression cassette and the second expression cassette can be in the same orientation within the vector. In certain embodiments, the first expression cassette and the second expression cassette can be in the opposite orientation within the vector.

[0746] Accordingly, a packaging system of the present disclosure comprises: (i) a recombinant rabies virus genome vector (e.g., virus genome transfecting plasmid); and (ii) one or more transfecting plasmids comprising the N, P, L, M, and/or G genes. The one or more transfecting plasmids comprising the N, P, L, M, and/or G genes can be introduced into a host cell (e.g., a recombinant rabies virus particle packaging cell) using various methods known to those of ordinary skill in the art. For example, the one or more transfecting plasmids can be introduced into a suitable host cell by electroporation, nucleofection, or lipofection.

[0747] The present disclosure also provides a method for the recombinant preparation of a rabies virus particle, wherein the method comprises introducing a packaging system described herein into a cell under conditions operative for enveloping the recombinant rabies virus genome to form the recombinant rabies virus particle. In certain embodiments, host packaging cell can be transiently transfected with the one or more transfecting plasmids comprising the N, P, L, M, and/or G genes. In certain embodiments, the host packaging cell can be transfected with the one or more transfecting plasmids comprising the N, P, L, M, and/or G genes, wherein the host packaging cell is further made into a stable cell line. Various methods for producing stable cell lines are known to those of ordinary skill in the art. In general, the gene of interest (e.g., N, P, L, M and/or G genes) is introduced into a cell, and then into the nucleus of the cell, and finally integrated into the genome of the cell. Chromosomal integration events are rare and stably-integrated cell lines have to be selected and cultured. Various selection systems are known in the art, including resistance to antibiotics such as neomycin phosphotransferase, conferring resistance to G418, dihydrofolate reductase (DHFR), or glutamine synthetase. Other methods for producing stable cell lines include the use of the Sleeping Beauty (SB) system, as described in the Experimental Examples. Briefly, a transposon comprising the integrant of interest is designed with flanking inverted repeat/direct repeat sequences that result in precise integration into a TA dinucleotide. Methods for SB transposon based stable cell line generation is known in the art, see, e.g., Davidson et al., Cold Spring Harb Protoc. (2009) 4(8): 1018-1023. Stable cell lines can also be generated via the use of lentiviral vectors, see, e.g., Tandon et al., Bio Protoc. (2018) 8(21): e3073.

[0748] A recombinant rabies virus genome vector (e.g., virus genome transfecting plasmid) is then introduced into a host packaging cell that has the N, P, L, M, and/or G genes stably-integrated or transiently transfected therein.

[0749] As such, in certain embodiments, a method for the recombinant preparation of a rabies virus particle comprises introducing (i) a recombinant rabies virus genome vector (e.g., virus genome transfecting plasmid); and (ii) one or more transfecting plasmids comprising the N, P, L, M, and/or G genes into a host packaging cell. In certain embodiments, a method for the recombinant preparation of a rabies virus particle comprises introducing a recombinant rabies virus genome vector (e.g., virus genome transfecting plasmid) into a host packaging cell, wherein the host packaging cell comprises the N, P, L, M, and/or G genes stably integrated therein. Methods for the preparation of recombinant rabies virus particles are known in the art, see, e.g., Trabelsi et al., Vaccine (2019) 37(47): 7052-7060; Wickersham et al., Nature Protoc. (2010) 5(3): 595-606; Ghanem et al., Eur. J. Cell Biol. (2012) 91: 10-16; Osakada and Wickersham, Nature Protoc. (2013) 8(8): 1583-1601; and Sullivan and Wickersham, Cold Spring Harb Protoc. (2015) 4: 386-91, the disclosures of which are herein incorporated by reference in their entireties.

[0750] In certain embodiments, the recombinant rabies virus particle titer that is obtained using a method of production described herein is greater than about 1E8 transducing units (TU)/mL. For example, in certain embodiments, the recombinant rabies virus particle titer that is obtained is about 8E7 TU/mL, about 9E7 TU/mL, about 1E8 TU/mL, about 1.1E8 TU/mL, about 1.2E8 TU/mL, about 1.3E8 TU/mL, about 1.4E8 TU/mL, about 1.5E8 TU/mL, about 1.6E8 TU/mL, about 1.7E8 TU/mL, about 1.8E8 TU/mL, about 1.9E8 TU/mL, about 2E8 TU/mL, about 2.5E8 TU/mL, about 3E8 TU/mL, about 3.5E8 TU/mL, about 4E8 TU/mL, about 4.5E8 TU/mL, about 5E8 TU/mL, about 5.5E8 TU/mL, about 6E8 TU/mL, about 6.5E8 TU/mL, about 7E8 TU/mL, about 7.5E8 TU/mL, about 8E8 TU/mL, about 8.5E8 TU/mL, about 9E8 TU/mL, about 9.1E8 TU/mL, about 9.2E8 TU/mL, about 9.3E8 TU/mL, about 9.4E8 TU/mL, about 9.5E8 TU/mL, about 9.6E8 TU/mL, about 9.7E8 TU/mL, about 9.8E8 TU/mL, about 9.9E8 TU/mL, about 1E9 TU/mL, about 1.1E9 TU/mL, about 1.2E9 TU/mL, or any value in between the aforementioned titers. In certain embodiments, the recombinant rabies virus particle titer that is obtained is from about 1E8 TU/mL to about 1E9 TU/mL, e.g., from 8E7 TU/mL to 1.2E9 TU/mL, and any range therebetween.

### J. METHODS OF GENE THERAPY

[0751] Provided herein are methods of gene therapy using the recombinant rabies virus particles described herein. In certain embodiments, a method for expressing a theapeutic transgene in a target cell, is provided. In certain embodiments, a method for expressing a base editor in a target cell, is provided.

[0752] In certain embodiments, a method for expressing a therapeutic transgene in a target cell comprises tranducing a target cell with a recombinant rabies virus particle as described herein. For example, a method for expressing a therapeutic transgene in a target cell comprises transducing a target cell with a recombinant rabies virus particle comprising a rabies virus glycoprotein; and a recombinant rabies virus genome comprising a nucleic acid encoding a therapeutic transgene, wherein: the genome lacks a G gene encoding for a rabies virus glycoprotein or a functional variant thereof; and/or the genome lacks an L gene encoding for a rabies virus polymerase or a functional variant thereof. In certain embodiments, the method comprises transducing a target cell with a recombinant rabies virus particle comprising a rabies virus glycoprotein; and a recombinant rabies virus genome comprising a nucleic acid encoding a therapeutic transgene, wherein: the genome lacks a G gene encoding for a rabies virus glycoprotein or a functional variant thereof. In certain embodiments, the method comprises transducing a target cell with a recombinant rabies virus particle comprising a rabies virus glycoprotein; and a recombinant rabies virus genome comprising a nucleic acid encoding a therapeutic transgene, wherein: the genome lacks a G gene encoding for a rabies virus glycoprotein or a functional variant thereof; and the genome lacks an L gene encoding for a rabies virus polymerase or a functional variant thereof.

[0753] Various methods of transducing a target cell with a recombinant virus particle are known to those of ordinary skill in the art. For example, the target cell can be contacted with the recombinant virus particle, resulting in receptor-mediated attachment of the virus particle, followed by clathrin-dependent endocytosis of the virus particle into the cell.

[0754] In certain embodiments, methods are provided for expressing a nucleobase editor in a target cell. For example, such methods comprise transducing a target cell with a recombinant rabies virus particle, wherein the recombinant virus particle comprises: a rabies virus glycoprotein; and a recombinant rabies virus genome comprising a nucleic acid encoding a nucleobase editor comprising a polynucleotide programmable nucleotide binding domain and a nucleobase editing domain, wherein: the genome lacks a G gene encoding for a rabies virus glycoprotein or a functional variant thereof; and/or the genome lacks an L gene encoding for a rabies virus polymerase or a functional variant thereof. In certain embodiments, the method comprises transducing a target cell with a recombinant rabies virus particle, wherein the recombinant virus particle comprises: a rabies virus glycoprotein; and a recombinant rabies virus genome comprising a nucleic acid encoding a nucleobase editor comprising a polynucleotide programmable nucleotide binding domain and a nucleobase editing domain, wherein: the genome lacks a G gene encoding for a rabies virus glycoprotein or a functional variant thereof. In certain embodiments, the method comprises transducing a target cell with a recombinant rabies virus particle, wherein the recombinant virus particle comprises: a rabies virus glycoprotein; and a recombinant rabies virus genome comprising a nucleic acid encoding a nucleobase editor comprising a polynucleotide programmable nucleotide binding domain and a nucleobase editing domain, wherein: the genome lacks a G gene encoding for a rabies virus glycoprotein or a functional variant thereof; and the genome lacks an L gene encoding for a rabies virus polymerase or a functional variant thereof.

[0755] Where the methods are for expressing a nucleobase editor in a target cell, the polynucleotide programmable nucleotide binding domain, when in conjunction with a bound guide polynucleotide (e.g., gRNA), can specifically bind to a target polynucleotide sequence and thereby localize the base editor to the target nucleic acid sequence desired to be edited.

[0756] In certain embodiments, the gRNA is provided to the target cell in cis. For example, the gRNA can be comprised within the recombinant rabies virus genome. The gRNA can be comprised within the recombinant rabies virus genome at any location, for example, between a one or more rabies virus genes (e.g., an N gene or a P gene) and the nucleic acid encoding the nucleobase editor, or between two rabies virus genes, or at a terminal end of the recombinant rabies virus genome (e.g., the 5′ end, or the 3′ end).

[0757] In certain embodiments, the gRNA is provided to the target cell in trans (e.g., provided exogenously). For example, the gRNA can be comprises within a separate vector outside of the recombinant rabies virus particle. Suitable vectors include, without limitation, viral vectors, plasmids, and other known to those of skill in the art. In embodiments where the gRNA is provided to the target cell in trans, the gRNA vector is introduced into the target cell via various methods known to those of skill in the art, for example, without limitation, electroporation.

[0758] Methods for delivering a therapeutic transgene (e.g., a nucleobase editor) to a subject are also provided. In certain embodiments, the method comprises administering to the subject a recombinant rabies virus particle, wherein the recombinant virus particle comprises: a rabies virus glycoprotein; and a recombinant rabies virus genome comprising a nucleic acid encoding the therapeutic transgene (e.g., a nucleobase editor comprising a polynucleotide programmable nucleotide binding domain and a nucleobase editing domain), wherein: the genome lacks a G gene encoding for a rabies virus glycoprotein or a functional variant thereof; and/or the genome lacks an L gene encoding for a rabies virus polymerase or a functional variant thereof. In certain embodiments, the method comprises administering to the subject a recombinant rabies virus particle, wherein the recombinant virus particle comprises: a rabies virus glycoprotein; and a recombinant rabies virus genome comprising a nucleic acid encoding the therapeutic transgene (e.g., a nucleobase editor comprising a polynucleotide programmable nucleotide binding domain and a nucleobase editing domain), wherein: the genome lacks a G gene encoding for a rabies virus glycoprotein or a functional variant thereof. In certain embodiments, the method comprises administering to the subject a recombinant rabies virus particle, wherein the recombinant virus particle comprises: a rabies virus glycoprotein; and a recombinant rabies virus genome comprising a nucleic acid encoding the therapeutic transgene (e.g., a nucleobase editor comprising a polynucleotide programmable nucleotide binding domain and a nucleobase editing domain), wherein: the genome lacks a G gene encoding for a rabies virus glycoprotein or a functional variant thereof; and the genome lacks an L gene encoding for a rabies virus polymerase or a functional variant thereof.

[0759] The methods of delivery and/or expressing a therapeutic transgene (e.g., a nucleobase editor comprising a polynucleotide programmable nucleotide binding domain and a nucleobase editing domain) find use in the treatment of a disease or disorder. In certain embodiments, a method of treating a disease or disorder in a subject comprises administering a recombinant rabies virus particle described herein, or a pharmaceutical composition described herein. In certain embodiments, the disease or disorder is a neurologic disease or disorder. In certain embodiments, the disease or disorder is a ophthalmic disease or disorder.

[0760] Administration of the pharmaceutical compositions contemplated herein may be carried out using conventional techniques including, but not limited to, infusion, transfusion, or parenterally. In some embodiments, parenteral administration includes infusing or injecting intravascularly, intravenously, intramuscularly, intraarterially, intrathecally, intratumorally, intradermally, intraperitoneally, transtracheally, subcutaneously, subcuticularly, intraarticularly, subcapsularly, subarachnoidly and intrasternally.

[0761] The practice of the present invention employs, unless otherwise indicated, conventional techniques of molecular biology (including recombinant techniques), microbiology, cell biology, biochemistry and immunology, which are well within the purview of the skilled artisan. Such techniques are explained fully in the literature, such as, “Molecular Cloning: A Laboratory Manual”, second edition (Sambrook, 1989); “Oligonucleotide Synthesis” (Gait, 1984); “Animal Cell Culture” (Freshney, 1987); “Methods in Enzymology” “Handbook of Experimental Immunology” (Weir, 1996); “Gene Transfer Vectors for Mammalian Cells” (Miller and Calos, 1987); “Current Protocols in Molecular Biology” (Ausubel, 1987); “PCR: The Polymerase Chain Reaction”, (Mullis, 1994); “Current Protocols in Immunology” (Coligan, 1991). These techniques are applicable to the production of the polynucleotides and polypeptides of the invention, and, as such, may be considered in making and practicing the invention. Particularly useful techniques for particular embodiments will be discussed in the sections that follow.

[0762] The following examples are put forth so as to provide those of ordinary skill in the art with a complete disclosure and description of how to make and use the assay, screening, and therapeutic methods of the invention, and are not intended to limit the scope of what the inventors regard as their invention.

### K. EXPERIMENTAL EXAMPLES

### Example 1: Generation of Stable Cell Lines

[0763] The stable cell lines described in Table 16 below were generated:

TABLE 16
Stable cell lines

| | | Integrating | Selection |
|---|---|---|---|
| Cell line name | Description | vector | marker |
| CA1.9 | HEK293T cell line | VIR120 | Blasticidin |
| (RABV-G) | stably expressing | | |
| | rabies virus G gene | | |
| CE1.13 | HEK293T cell line | VIR035 | Blasticidin |
| (RABV-G) | stably expressing | | |
| | codon-optimized rabies | | |
| | virus G gene | | |
| CA3.11 | HEK293T cell line | VIR069 | Blasticidin |
| | stably expressing | | |
| | rabies virus N, P, and L | | |
| | genes | | |
| CA4.27 | HEK293T cell line | VIR071 | Zeocin |
| | stably expressing | | |
| | rabies virus N, P, and L | | |
| | genes | | |
| CA3.10 and | HEK293T cell line | VIR121 | Blasticidin |
| CE1.10 | stably expressing | | |
| | rabies virus M gene | | |
| CE1.30 | HEK293T cell line | VIR112 | Zeocin |
| | stably expressing | | |
| | rabies virus N, P, M, | | |
| | and L genes | | |

[0764] One of the Sleeping Beauty transposase system-compatiable integrating vectors selected from VIR120, VIR035, VIR069, VIR071, VIR121, and VIR112 were co-transfected into HEK293T cells with the Sleeping Beauty transposase SB100X. VIR120 contains an expression cassette comprising a rabies virus G gene under the control of an EF1-alpha promoter; VIR035 contains an expression cassette comprising a codon-optimized rabies virus G gene under the control of an EF1-alpha promoter; VIR069 contains an expression cassette comprising from 5′ to 3′: an EF1-alpha promoter, a rabies virus N gene, a T2A peptide, a rabies virus P gene, a P2A peptide, and a rabies virus L gene; VIR071 contains a first expression cassette comprising from 5′ to 3′: an EF1-alpha promoter, a rabies virus M gene, a P2A peptide, a rabies virus P gene, an IRES, and a rabies virus N gene, and a second expression cassette comprising from 5′ to 3′: an RPBSA promoter, and a rabies virus L gene, wherein the first and the second expression cassettes are in opposite orientations; VIR121 contains an expression cassette comprising a rabies virus M gene under the control of an EF1-alpha promoter; and VIR112 contains an expression cassette comprising from 5′ to 3′: a rabies N gene, an IRES, a rabies P gene, an IRES, and a rabies M gene under the control of an EF1-alpha, and and a second expression cassette comprising from 5′ to 3′: a Zeocin, T2A peptide, and rabies L gene under the control of an RPBSA promoter, wherein the first and the second expression cassettes are in opposite orientations. Schematics of the VIR069, VIR071, and VIR112 vectors are shown in FIG. 12.

[0765] One day after co-transfection, selection was begun using blasticidin or zeocin, depending on the integrating vector used. Selection continued through days 2 to 21 after co-transfection as necessary. By day 28, all surviving cells had the stably integrated transgene.

### Example 2: Production of Recombinant Rabies Virus Particles

[0766] For primary production, on day 0, Lipofectamine 3000 was used to transfect (i) 1.5 μg of complement plasmid mix of expression vectors, and (ii) 0.5 μg of plasmid encoding the rabies replicon, into a stable cell line. Transfections were performed according to Table 17:

TABLE 17
Transfection Mixes

| Stable cell line | Complement plasmid mix | Replicon |
|---|---|---|
| RABV-G | DNA52 + VIR8, VIR9, | VIR045 “G-deleted” |
| | VIR10, VIR11, VIR12 | |
| RABV-G | DNA52 + VIR8, VIR9, | VIR092 “G/L-deleted” |
| | VIR10, VIR11, VIR12 | |
| CA3.11 | DNA52 + VIR8, VIR9, | VIR045 “G-deleted” |
| | VIR10, VIR11, VIR12 | |
| CA3.11 | DNA52 + VIR8, VIR9, | VIR092 “G/L-deleted” |
| | VIR10, VIR11, VIR12 | |
| CA4.27 | DNA52 + VIR8, VIR9, | VIR045 “G-deleted” |
| | VIR10, VIR11, VIR12 | |
| CA4.27 | DNA52 + VIR8, VIR9, | VIR092 “G/L-deleted” |
| | VIR10, VIR11, VIR12 | |

[0767] The VIR045 replicon contains rabies SAD L16 full replicon with the G gene deleted. The VIR092 replicon was derived from VIR045 with the L gene further deleted. Both VIR045 and VIR092 contains sequence encoding GFP. DNA52 is an expression vector comprising a sequence encoding T7 RNA polymerase. VIR8-12 are an expression vectors comprising a rabies virus N, P, M, G, and L genes.

[0768] On day 1, media was changed to OptiMem+5% FBS (“O5”). Day 1 media was discarded. Beginning on day 3, viral supernatant was harvested and media was replaced with fresh O5 media daily. Viral supernatants from days 3-7 were pooled and stored at 4° C.

[0769] The pooled viral supernatants were clarified to remove cellular debris by centrifugation at 4000 rpm for 15 minutes. Viral particles were precipitated and concentrated following protocol for the Lenti-X Concentrator (Takara Bio). Supernatant was removed, and the pellet was resuspended in 05 media to produce concentrated viral stock. The concentrated viral stock was used to seed subsequent amplification passages.

[0770] Secondary viral amplification was performed as follows. On day 0, viral stock was added to stable cell lines. Additional plasmids were co-transfected into the stable cell lines at the time of transduction, if necessary. For viral stock produced using the VIR045 replicon, nothing additional was required when amplified in the RABV-G stable cell line. For viral stock produced using the VIR092 replicon, amplication was performed in the following ways, with efficiency shown in parenthesis—more “+” indicates higher efficiency: (1) RABV-G stable cell line co-transfected with a plasmid containing the N, P, and L genes (+); (2) CA4.27 stable cell line co-transfected with a plasmid containing the G gene (++); and (3) CA4.27 stable cell line with the G gene further stably integrated (+++).

[0771] On day 1, media was changed to O5 media. Day 1 media was discarded. On days 2 to 7, viral supernatants were harvested and pooled.

[0772] In another experiment, GFP expression was compared between primary transfection cell lines HEK293T control cells, RABV-G, CA3.11, and CA4.27, transfected with either the VIR045 or the VIR092 replicon. Full complement plasmid mixes were co-transfected into each cell line. Table 18 shows qualitative levels of GFP expression based on images taken 8 days after primary transfection, where the more “+” indicates higher GFP expression.

TABLE 18
GFP Expression in Primary Transfection Cell Lines

| Replicon | HEK293T | RABV-G | CA3.11 | CA4.27 |
|---|---|---|---|---|
| VIR045 | + | +++++ | + | +++ |
| VIR092 | − | − | − | ++ |

[0773] Viral supernatants were collected daily on days 2 to 4, pooled, and concentrated by the Lenti-X Concentrator. The concentrated VIR045 viral supernatant was added to RABV-G cells and the concentration VIR092 viral supernatant was added to RABV-G cells transfected with a plasmid containing the N, P, and L genes. Qualitative levels of GFP expression, indicating production of recombinant rabies virus particles, based on images taken 2 days after transfection are shown in Table 19, where the more “+” indicates higher GFP expression.

TABLE 19
GFP Expression in First Amplification

| Replicon | HEK293T | RABV-G | CA3.11 | CA4.27 |
|---|---|---|---|---|
| VIR045 | + | +++++ | + | + |
| VIR092 | +++ | +++ | +++ | +++ |

[0774] In another experiment, recombinant rabies virus relative infectivity was determined for the viral supernatant obtained from using various stable cell lines were determined (FIG. 1).

[0775] Stable cell lines c1, c8, c39, c40, c53, and c54 were clonal cell lines derived from the CA3.11 stable cell line (“bulk”). BHK cell lines using integrating vector VIR069 (“BHK”), and integrating vector VIR120 (“BHK-G”) were also generated. CA4.27 cells were plated at 0.4, 0.6, 0.8, or 1 million cells per well.

[0776] Viral supernatant was harvested on different days (D2 or D3) and subsequently used to infect naive HEK293T cells at the volumes indicates on FIG. 1 (5 uL or 30 uL). Titering was performed by flow cytometry, showing the percentage of cells that were infected as determined by expression of GFP.

### Example 3: Recombinant Rabies Virus Particle Gene Delivery

[0777] To investigate whether recombinant rabies virus particles could be used for gene delivery, replicon VIR218 was generated. VIR218 was derived from VIR092 with the addition of sequence encoding the adenosine deaminase ABE7.10; FIG. 2A is a schematic of VIR218. FIG. 2B is a schemating showing the production and amplification scheme that was followed. Primary production was performed by co-transfecting VIR218 with a full complement plasmid mix into naive HEK293T cells. Secondary and tertiary amplifications were performed with additional transfection of a plasmid containing the N, P, and L genes on the RABV-G cell line. Viral supernatants were collected and concentrated as described above to produce a viral stock. The viral stock was then added to naive 293T cells together with transfecting via lipofection a plasmid comprising a gRNA targeting HEK2-2 (gaacacaaagcatagactgc; SEQ ID NO:4011), and optionally co-transfecting with a plasmid comprising the L gene (“supplemental L”). Genomic DNA was extracted and standard PCR/library preparation was performed to amplify out the genomic target and assess editing (FIG. 2C). As shown in FIG. 2C, A>G editing was detected in infected HEK293T cells.

### Example 4: Recombinant Rabies Virus Genome

[0778] Examples 1-3 described the use of a recombinant rabies virus genome in a ΔGL background. Production of virus was next tested in a recombinant rabies virus genome in a ΔLL (i.e., ΔGLNPM) background (see depictions of the replicons in FIG. 4A). The tested rabies virus replicons encoded a Cre recombinase-2A-GFP reporter gene.

[0779] As shown in FIG. 4B, cells transfected with rabies virus vectors in a ΔG, ΔGL, or ΔLL (i.e., ΔGLNPM) background emitted flourescence from the Cre recombinase-2A-GFP reporter gene. Images were taken 6 days post-transfection under a standard transfection and an optimized transfection as depicted in FIG. 2B.

[0780] As shown in FIG. 4C, % viral entry of rabies virus produced in FIG. 4B was determined following transduction into reporter cells, as measured by GFP flourescence.

[0781] This work demonstrates that an engineered recombinant rabies virus genome that lacks all viral genes (i.e., ΔLL or ΔGLNPM) can be used to express a transgene.

### Example 5: Encoding gRNA into Rabies Genome with Cleaving tRNAs

[0782] To investigate whether gRNA could be encoded in the rabies viral genome, replicon VIR621 was generated in the organization shown in FIG. 3A. VIR621 was derived from DNA538 which encoded two flanking cleaving tRNAs and an intervening gRNA (FIG. 3B) with the addition of sequences encoding the polynucleotide programmable nucleotide binding domain and adenosine deaminase contained in ABE8 and the viral genome lacking the G gene (FIG. 3A). Multiple target tRNAs were also encoded between or after different tRNA combinations allowing for multiplexing (FIG. 3C, FIG. 3D). Several combinations of tRNAs and gRNAs as listed in Table 20 were tested for editing efficiency in FIG. 3E. As shown in FIG. 3E, A>G editing of HEK2 and IEDG genes was detected in infected HEK293T cells with viral replicons containing no gRNA (VIR596), single gRNA targeting HEK2 (VIR621, VIR622), single gRNA targeting IEDG (VIR712, VIR713), or multiplexed multiple gRNAs targeting HEK2 and IEDG in the same viral replicon (VIR714, VIR715, VIR717, VIR718, VIR719, VIR720, VIR627, VIR628, VIR629).

TABLE 20
tRNA and gRNA Replicons

| | | | | |
|---|---|---|---|---|
| VIR621 | SynV ΔG | tRNA Pro | gtacaagTAAGAAGTTGAAT | 4024 |
| | ABE8-20- | 3′ | AACAAAATGCCGGAAATCTA | |
| | 2a-GFP | release | CGGATTGTGTATATCCATCA | |
| | tRNA | | TGAAAAAAACTAACACCCCT | |
| | Pro- | | CCTTTCGAACCATCCCAAAC | |
| | Hek2 | | ggctcgttggtctaggggta | |
| | gRNA | | tgattctcgcttagggtgcg | |
| | | | agaggtcccgggttcaaatc | |
| | | | ccggacgagcccGGAACACA | |
| | | | AAGCATAGACTGCgttttag | |
| | | | agctaGAAAtagcaagttaa | |
| | | | aataaggctagtccgttatc | |
| | | | aacttgaaaaagtggcaccg | |
| | | | agtcggtgcttttCGAGGAA | |
| | | | GGAGGTCTGAGGAGGTCACT | |
| | | | Gcgaaccagtttgtgtcggc | |
| | | | tcgttggtctaggggtatga | |
| | | | ttctcgcttagggtgcgaga | |
| | | | ggtcccgggttcaaatcccg | |
| | | | gacgagccctctagaagtgc | |
| | | | tgggtcatcta | |
| VIR622 | SynV ΔG | tRNA Ile | gtacaagTAAGAAGTTGAAT | 4025 |
| | ABE8-20- | 3′ | AACAAAATGCCGGAAATCTA | |
| | 2a-GFP | release | CGGATTGTGTATATCCATCA | |
| | tRNA | | TGAAAAAAACTAACACCCCT | |
| | Ile- | | CCTTTCGAACCATCCCAAAC | |
| | Hek2 | | gctccagtggcgcaatcggt | |
| | gRNA | | tagcgcgcggtacttataag | |
| | | | acagtgcacctgtgagcaat | |
| | | | gccgaggttgtgagttcaag | |
| | | | cctcacctggagcaGGAACA | |
| | | | CAAAGCATAGACTGCgtttt | |
| | | | agagctaGAAAtagcaagtt | |
| | | | aaaataaggctagtccgtta | |
| | | | tcaacttgaaaaagtggcac | |
| | | | cgagtcggtgcttCACACAC | |
| | | | ACAAgctccagtggcgcaat | |
| | | | cggttagcgcgcggtactta | |
| | | | taagacagtgcaGCCgCGAG | |
| | | | GAAGGAGGTCTGAGGAGGTC | |
| | | | ACTGcGGCcctgtgagcaat | |
| | | | gccgaggttgtgagttcaag | |
| | | | cctcacctggagcata | |
| VIR623 | SynV ΔG | tRNA | gtacaagTAAGAAGTTGAAT | 4026 |
| | ABE8-20- | apical | AACAAAATGCCGGAAATCTA | |
| | 2a-GFP | release | CGGATTGTGTATATCCATCA | |
| | tRNA | | TGAAAAAAACTAACACCCCT | |
| | Ile- | | CCTTTCGAACCATCCCAAAC | |
| | apical | | gctccagtggcgcaatcggt | |
| | Hek2 | | tagcgcgcggtacttataag | |
| | gRNA | | acagtgcaGAACACAAAGCA | |
| | | | TAGACTGCgttttagagcta | |
| | | | CCGAAAGGtagcaagttaaa | |
| | | | ataaggctagtccgttatca | |
| | | | acttgaaaaagtggcaccga | |
| | | | gtcggtgcttcacacacaca | |
| | | | caCGAGGAAGGAGGTCTGAG | |
| | | | GAGGTCACTGcgcctgtgag | |
| | | | caatgccgaggttgtgagtt | |
| | | | caagcctcacctggagcata | |
| VIR624 | SynV ΔG | tRNA | gtacaagTAAGAAGTTGAAT | 4027 |
| | ABE8-20- | apical | AACAAAATGCCGGAAATCTA | |
| | 2a-GFP | release | CGGATTGTGTATATCCATCA | |
| | tRNA | with | TGAAAAAAACTAACACCCCT | |
| | Ile- | long | CCTTTCGAACCATCCCAAAC | |
| | apical | linker | gctccagtggcgcaatcggt | |
| | Hek2 | | tagcgcgcggtacttataag | |
| | gRNA | | acagtgcagGAACACAAAGC | |
| | with | | ATAGACTGCgttttagagct | |
| | long | | aCCGAAAGGtagcaagttaa | |
| | linker | | aaCaaggctagtccgttatc | |
| | | | aacttgaaaaagtggcaccg | |
| | | | agtcggtgctttGGCCCGAG | |
| | | | GAAGGAGGTCTGAGGAGGTC | |
| | | | ACTGGGCCAAAACAACAACC | |
| | | | CAACCAACAAACCAACACCA | |
| | | | AACAACAAACCAAACCCCAA | |
| | | | CAAACAACCACCAACCCAAA | |
| | | | CAAcctgtgagcaatgccga | |
| | | | ggttgtgagttcaagcctca | |
| | | | cctggagcata | |
| VIR625 | SynV ΔG | tRNA | gtacaagTAAGAAGTTGAAT | 4028 |
| | ABE8-20- | apical | AACAAAATGCCGGAAATCTA | |
| | 2a-GFP | release | CGGATTGTGTATATCCATCA | |
| | tRNA | stabi- | TGAAAAAAACTAACACCCCT | |
| | Ile- | lized | CCTTTCGAACCATCCCAAAC | |
| | apical | | gctccagtggcgcaatcggt | |
| | Flek2 | | tagcgcgcggtacttataag | |
| | gRNA | | acagtgcaGGAGCCCGAACA | |
| | with | | CAAAGCATAGACTGCgtttt | |
| | long | | agagctaGGCCCGAGGAAGG | |
| | linker | | AGGTCTGAGGAGGTCACTGG | |
| | | | GCCtagcaagttaaaataag | |
| | | | gctagtccgttatcaacttg | |
| | | | aaaaagtggcaccgagtcgg | |
| | | | tgcttAAAACAACAACCCAA | |
| | | | CCAACAAACCAACACCAAAC | |
| | | | AACAAACCAAACCCCAACAA | |
| | | | ACAACCACCAACCCAAACAA | |
| | | | GGGCTCCcctgtgagcaatg | |
| | | | ccgaggttgtgagttcaagc | |
| | | | ctcacctggagcata | |
| VIR626 | SynV ΔG | tRNA Ile | gtacaagTAAGAAGTTGAAT | 4029 |
| | ABE8- | permuted | AACAAAATGCCGGAAATCTA | |
| | 20- | | CGGATTGTGTATATCCATCA | |
| | 2a-GFP | | TGAAAAAAACTAACACCCCT | |
| | tRNA Ile | | CCTTTCGAACCATCCCAAAC | |
| | permuted | | GGGCTCCcctgtgagcaatg | |
| | Hek2 | | ccgaggttgtgagttcaagc | |
| | gRNA | | ctcacctggagcaGAAAgct | |
| | | | ccagtggcgcaatcggttag | |
| | | | cgcgcggtacttataagaca | |
| | | | gtgcaGGAGCCCGAACACAA | |
| | | | AGCATAGACTGCgttttaga | |
| | | | gctaGGCCCGAGGAAGGAGG | |
| | | | TCTGAGGAGGTCACTGGGCC | |
| | | | tagc | |
| | | | aagttaaaataaggctagtc | |
| | | | cgttatcaacttgaaaaagt | |
| | | | ggcaccgagtcggtgcttAA | |
| | | | AACAACAACCCAACCAACAA | |
| | | | ACCAACACCAAACAACAAAC | |
| | | | CAAACCCCAACAAACAACCA | |
| | | | CCAACCCAAACAAta | |
| VIR627 | SynRV | P-IEDG- | AACATCCCTCAAAagactca | 4030 |
| | tRNA-Pro- | T- | aggaaagggctcgttggtct | |
| | Thr IEDG | Hek2 | aggggtatgattctcgctta | |
| | Hek2 AG | | gggtgcgagaggtcccgggt | |
| | Abe820m- | | tcaaatcccggacgagcccG | |
| | T2a- | | cgtGtAgggTaaccatgaac | |
| | mScarlet | | GTTTTAGAGCTAGAAATAGC | |
| | | | AAGTTAAAATAAGGCTAGTC | |
| | | | CGTTATCAACTTGAAAAAGT | |
| | | | GGCACCGAGTCGGTGCTTTT | |
| | | | TTCACACACACAAggctcca | |
| | | | tagctcaggggttagagcac | |
| | | | tggtcttgtaaaccaggggt | |
| | | | cgcgagttcaattctcgctg | |
| | | | gggcttGGAACACAAAGCAT | |
| | | | AGACTGCgttttagagctaG | |
| | | | CCgCGAGGAAGGAGGTCTGA | |
| | | | GGAGGTCACTGcGGCtagca | |
| | | | agttaaaataaggctagtcc | |
| | | | gttatcaacttgaaaaagtg | |
| | | | gcaccgagtcggtgcttttt | |
| | | | aaTTAAccgagaaaaaaa | |
| VIR628 | SynRV | V-IEDG- | AACATCCCTCAAAagactca | 4031 |
| | tRNA-Val- | K- | aggaaaggtttccgtagtgt | |
| | Lys IEDG | Hek2 | agtggttatcacgttcgcct | |
| | Hek2 AG | | cacacgcgaaaggtccccgg | |
| | Abe820m- | | ttcgaaaccgggcggaaaca | |
| | T2a- | | GcgtGtAgggTaaccatgaa | |
| | mScarlet | | cGTTTTAGAGCTAGAAATAG | |
| | | | CAAGTTAAAATAAGGCTAGT | |
| | | | CCGTTATCAACTTGAAAAAG | |
| | | | TGGCACCGAGTCGGTGCTTT | |
| | | | TTTCACACACACAAgcccgg | |
| | | | ctagctcagtcggtagagca | |
| | | | tgagactcttaatctcaggg | |
| | | | tcgtgggttcgagccccacg | |
| | | | ttgggcgGGAACACAAAGCA | |
| | | | TAGACTGCgttttagagcta | |
| | | | GCCgCGAGGAAGGAGGTCTG | |
| | | | AGGAGGTCACTGcGGCtagc | |
| | | | aagttaaaataaggctagtc | |
| | | | cgttatcaacttgaaaaagt | |
| | | | ggcaccgagtcggtgctttt | |
| | | | taaTTAAccgagaaaaaaa | |
| VIR629 | SynRV | D-IEDG- | AACATCCCTCAAAagactca | 4032 |
| | tRNA- | G- | aggaaagtcctcgttagtat | |
| | Asp- | Hek2-Q | agtggtgagtatccccgcct | |
| | Gly-Glu | | gtcacgcgggagaccggggt | |
| | IEDG | | tcgattccccgacggggagG | |
| | Hek2 | | cgtGtAgggTaaccatgaac | |
| | ΔG | | GTTTTAGAGCTAGAAATAGC | |
| | Abe820m- | | AA | |
| | T2a- | | GTTAAAATAAGGCTAGTCCG | |
| | mScarlet | | TTATCAACTTGAAAAAGTGG | |
| | | | CACCGAGTCGGTGCTTTTTT | |
| | | | CACACACACAAgcgttggtg | |
| | | | gtatagtggtgagcatagct | |
| | | | gccttccaagcagttgaccc | |
| | | | gggttcgattcccggccaac | |
| | | | gcaGG AACAC AAAGCAT | |
| | | | AG ACTGCgttttagagcta | |
| | | | GCCgCGAGGAAGGAGGTCTG | |
| | | | AGGAGGTCACTGcGGCtagc | |
| | | | aagttaaaataaggctagtc | |
| | | | cgttatcaacttgaaaaagt | |
| | | | ggcaccgagtcggtgctttC | |
| | | | ACACACACAAtccttggtgg | |
| | | | tctagtggttaggattcggc | |
| | | | gctctcaccgccgcggcccg | |
| | | | ggttcgattcccggtcaggg | |
| | | | aattaaTTAAccgagaaaaa | |
| | | | aa | |
| VIR712 | SynRV | VIR622 | AACATCCCTCAAAagactca | 4033 |
| | tRNA- | insert | aggaaaggctccagtggcgc | |
| | Ile- | | aatcggttagcgcgcggtac | |
| | Ile | | ttataagacagtgcacctgt | |
| | (corn) | | gagcaatgccgaggttgtga | |
| | IEDG | | gttcaagcctcacctggagc | |
| | Pad ΔG | | aGcgtGtAgggTaaccatga | |
| | Abe820m- | | acGTTTTAGAGCTAGAAATA | |
| | T2a- | | GCAAGTTAAAATAAGGCTAG | |
| | mScarlet | | TCCGTTATCAACTTGAAAAA | |
| | | | GTGGCACCGAGTCGGTGCTT | |
| | | | TTTTCACACACACAAgctcc | |
| | | | agtggcgcaatcggttagcg | |
| | | | cgcggtacttataagacagt | |
| | | | gcaGCCgCGAGGAAGGAGGT | |
| | | | CTGAGGAGGTCACTGcGGCc | |
| | | | ctgtgagcaatgccgaggtt | |
| | | | gtgagttcaagcctcacctg | |
| | | | gagcaTTAATTAAtccgaga | |
| | | | aaaaaa | |
| VIR713 | SynRV | 5′Ile | AACATCCCTCAAAagactca | 4034 |
| | tRNA-Ile | to Pad | aggaaaggctccagtggcgc | |
| | IEDG Pad | | aatcggttagcgcgcggtac | |
| | ΔG | | ttataagacagtgcacctgt | |
| | Abe820m- | | gagcaatgccgaggttgtga | |
| | T2a- | | gttcaagcctcacctggagc | |
| | mScarlet | | aGcgtGtAgggTaaccatga | |
| | | | acGTTTTAGAGCTAGAAATA | |
| | | | GCAAGTTAAAATAAGGCTAG | |
| | | | TCCGTTATCAACTTGAAAAA | |
| | | | GTGGCACCGAGTCGGT GCT | |
| | | | TTTTT aattaacgagaaaa | |
| | | | aaa | |
| VIR714 | SynRV | I-IEDG- | AACATCCCTCAAAagactca | 4035 |
| | tRNA- | I-Hek2 | aggaaaggctccagtggcgc | |
| | Ile-Ile | | aatcggttagcgcgcggtac | |
| | (corn) | | ttataagacagtgcacctgt | |
| | IEDG | | gagcaatgccgaggttgtga | |
| | Hek2 | | gttcaagcctcacctggagc | |
| | ΔG | | aGcgtGtAgggTaaccatga | |
| | Abe820m- | | acGTTTTAGAGCTAGAAATA | |
| | T2a- | | GCAAGTTAAAATAAGG | |
| | mScarlet | | CTAGTCCGTTATCAACTTGA | |
| | | | AAAAGTGGCACCGAGTCGGT | |
| | | | GCTTTTTTCACACACACAAg | |
| | | | ctccagtggcgcaatcggtt | |
| | | | agcgcgcggtacttataaga | |
| | | | cagtgcaGCCgCGAGGAAGG | |
| | | | AGGTCTGAGGAGGTCACTGc | |
| | | | GGCcctgtgagcaatgccga | |
| | | | ggttgtgagttcaagcctca | |
| | | | cctggagcaGGAACACAAAG | |
| | | | CATAGACTGCgttttagagc | |
| | | | taGCCgCGAGGAAGGAGGTC | |
| | | | TGAGGAGGTCACTGcGGCta | |
| | | | gcaagttaaaataaggctag | |
| | | | tccgttatcaacttgaaaaa | |
| | | | gtggcaccgagtcggtgctt | |
| | | | tttccgagaaaaaaa | |
| VIR715 | SynRV | I-IEDG- | AACATCCCTCAAAagactca | 4036 |
| | tRNA- | G-Hek2 | aggaaaggctccagtggcgc | |
| | Ile-Gly | | aatcggttagcgcgcggtac | |
| | IEDG | | ttataagacagtgcacctgt | |
| | Hek2 ΔG | | gagcaatgccgaggttgtga | |
| | Abe820m- | | gttcaagcctcacctggagc | |
| | T2a- | | aGcgtGtAgggTaaccatga | |
| | mScarlet | | acGTTTTAGAGCTAGAAATA | |
| | | | GCAAGTTAAAATAAGGCTAG | |
| | | | TCCGTTATCAACTTGAAAAA | |
| | | | GTGGCACCGAGTCGGTGCTT | |
| | | | TTTTCACACACACAAgcgtt | |
| | | | ggtggtatagtggtgagcat | |
| | | | agctgccttccaagcagttg | |
| | | | acccgggttcgattcccggc | |
| | | | caacgcaGGAACACAAAGCA | |
| | | | TAGACTGCgttttagagcta | |
| | | | GCCgCGAGGAAGGAGGTCTG | |
| | | | AGGAGGTCACTGcGGCtagc | |
| | | | aagttaaaataaggctagtc | |
| | | | cgttatcaacttgaaaaagt | |
| | | | ggcaccgagtcggtgctttt | |
| | | | taaTTAAccgagaaaaaaa | |
| VIR716 | SynRV | I-IEDG- | AACATCCCTCAAAagactca | 4037 |
| | tRNA- | K-Hek2 | aggaaaggctccagtggcgc | |
| | Ile-Lys | | aatcggttagcgcgcggtac | |
| | IEDG | | ttataagacagtgcacctgt | |
| | Hek2 ΔG | | gagcaatgccgaggttgtga | |
| | Abe820m- | | gttcaagcctcacctggagc | |
| | T2a- | | aGcgtGtAgggTaaccatga | |
| | mScarlet | | acGTTTTAGAGCTAGAAATA | |
| | | | GCAAGTTAAAATAAGGCTAG | |
| | | | TCCGTTATCAACTTGAAAAA | |
| | | | GTGGCACCGAGTCGGTGCTT | |
| | | | TTTTCACACACACAAgcccg | |
| | | | gctagctcagtcggtagagc | |
| | | | atgagactcttaatctcagg | |
| | | | gtcgtgggttcgagccccac | |
| | | | gttgggcgGGAACACAAAGC | |
| | | | ATAGACTGCgttttagagct | |
| | | | aGCCgCGAGGAAGGAGGTCT | |
| | | | GAGGAGGTCACTGcGGCtag | |
| | | | caagttaaaataaggctagt | |
| | | | ccgttatcaacttgaaaaag | |
| | | | tggcaccgagtcggtgcttt | |
| | | | ttaaTTAAccgagaaaaaaa | |
| VIR717 | SynRV | I-IEDG- | AACATCCCTCAAAagactca | 4038 |
| | tRNA- | L-Hek2 | aggaaaggctccagtggcgc | |
| | Ile- | | aatcggttagcgcgcggtac | |
| | Leu IEDG | | ttataagacagtgcacctgt | |
| | Hek2 ΔG | | gagcaatgccgaggttgtga | |
| | Abe820m- | | gttcaagcctcacctggagc | |
| | T2a- | | aGcgtGtAgggTaaccatga | |
| | mScarlet | | acGTTTTAGAGCTAGAAATA | |
| | | | GCAAGTTAAAATAAGGCTAG | |
| | | | TCCGTTATCAACTTGAAAAA | |
| | | | GTGGCACCGAGTCGGTGCTT | |
| | | | TTTTCACACACACAAggtag | |
| | | | cgtggccgagcggtctaagg | |
| | | | cgctggattaaggctccagt | |
| | | | ctcttcgggggcgtgggttc | |
| | | | gaatcccaccgctgccaGGA | |
| | | | ACACAAAGCATAGACTGCgt | |
| | | | tttagagctaGCCgCGAGGA | |
| | | | AGGAGGTCTGAGGAGGTCAC | |
| | | | TGcGGCtagcaagttaaaat | |
| | | | aaggctagtccgttatcaac | |
| | | | ttgaaaaagtggcaccgagt | |
| | | | cggtgctttttaaTTAAccg | |
| | | | agaaaaaaa | |
| VIR718 | SynRV | I-IEDG- | AACATCCCTCAAAagactca | 4017 |
| | tRNA- | P-Hek2 | aggaaaggctccagtggcgc | |
| | Ile- | | aatcggttagcgcgcggtac | |
| | Pro IEDG | | ttataagacagtgcacctgt | |
| | Hek2 ΔG | | gagcaatgccgaggttgtga | |
| | Abe820m- | | gttcaagcctcacctggagc | |
| | T2a- | | aGcgtGtAgggTaaccatga | |
| | mScarlet | | acGTTTTAGAGCTAGAAATA | |
| | | | GCAAGTTAAAATAAGGCTAG | |
| | | | TCCGTTATCAACTTGAAAAA | |
| | | | GTGGCACCGAGTCGGTGCTT | |
| | | | TTTTCACACACACAAggctc | |
| | | | gttggtctaggggtatgatt | |
| | | | ctcgcttagggtgcgagagg | |
| | | | tcccgggttcaaatcccgga | |
| | | | cgagcccGGAACACAAAGCA | |
| | | | TAGACTGCgttttagagcta | |
| | | | GCCgCGAGGAAGGAGGTCTG | |
| | | | AGGAGGTCACTGcGGCtagc | |
| | | | aagttaaaataaggctagtc | |
| | | | cgttatcaacttgaaaaagt | |
| | | | ggcaccgagtcggtgctttt | |
| | | | taaTTAA | |
| VIR719 | SynRV | I-IEDG- | AACATCCCTCAAAagactca | 4018 |
| | tRNA- | T-Hek2 | aggaaaggctccagtggcgc | |
| | Ile- | | aatcggttagcgcgcggtac | |
| | Thr | | ttataagacagtgcacctgt | |
| | IEDG | | gagcaatgccgaggttgtga | |
| | Hek2 ΔG | | gttcaagcctcacctggagc | |
| | Abe820m- | | aGcgtGtAgggTaaccatga | |
| | T2a- | | acGTTTTAGAGCTAGAAATA | |
| | mScarlet | | GCAAGTTAAAATAAGGCTAG | |
| | | | TCCGTTATCAACTTGAAAAA | |
| | | | GTGGCACCGAGTCGGTGCTT | |
| | | | TTTTCACACACACAAggctc | |
| | | | catagctcaggggttagagc | |
| | | | actggtcttgtaaaccaggg | |
| | | | gtcgcgagttcaattctcgc | |
| | | | tggggcttGGAACACAAAGC | |
| | | | ATAGACTGCgttttagagct | |
| | | | aGCCgCGAGGAAGGAGGTCT | |
| | | | GAGGAGGTCACTGcGGCtag | |
| | | | caagttaaaataaggctagt | |
| | | | ccgttatcaacttgaaaaag | |
| | | | tggcaccgagtcggtgcttt | |
| | | | ttaaTTAAccgagaaaaaaa | |
| VIR720 | SynRV | I-IEDG- | AACATCCCTCAAAagactca | 4019 |
| | tRNA- | V-Hek2 | aggaaaggctccagtggcgc | |
| | Ile-Val | | aatcggttagcgcgcggtac | |
| | IEDG | | ttataagacagtgcacctgt | |
| | Hek2 | | gagcaatgccgaggttgtga | |
| | ΔG | | gttcaagcctcacctggagc | |
| | Abe820m- | | aGcgtGtAgggTaaccatga | |
| | T2a- | | acGTTTTAGAGCTAGAAATA | |
| | mScarlet | | GCAAGTTAAAATAAGGCTAG | |
| | | | TCCGTTATCAACTTGAAAAA | |
| | | | GTGGCACCGAGTCGGTGCTT | |
| | | | TTTTCACACACACAAgtttc | |
| | | | cgtagtgtagtggttatcac | |
| | | | gttcgcctcacacgcgaaag | |
| | | | gtccccggttcgaaaccggg | |
| | | | cggaaacaGGAACACAAAGC | |
| | | | ATAGACTGCgttttagagct | |
| | | | aGCCgCGAGGAAGGAGGTCT | |
| | | | GAGGAGGTCACTGcGGCtag | |
| | | | caagttaaaataaggctagt | |
| | | | ccgttatcaacttgaaaaag | |
| | | | tggcaccgaglcggtgcttt | |
| | | | ttaaTTAAccgagaaaaaaa | |

DNA538 Sequence:

| | | | | |
|---|---|---|---|---|
| DNA538 | EFS- | tRNA-Pro- | ggctcgttggtctaggggtat | (SEQ |
| | tRNA- | HEK2 | gattctcgcttagggtgcga | ID |
| | Pro- | gRNA | gaggtcccgggttcaaatcc | NO: |
| | HEK2 | | cggacgagcccGAACACAAA | 4020) |
| | gRNA | | GCATAGACTGCgtCttagag | |
| | | | ctaGGCCCGAGGAAGGAGGT | |
| | | | CTGAGGAGGTCACTGGGCCt | |
| | | | agcaagttaaGataaggcta | |
| | | | gtccgttatcaacttgaaaa | |
| | | | agtggcaccgagtcggtgct | |
| | | | taaccagtttgtgtcggctc | |
| | | | gttggtctaggggtatgatt | |
| | | | ctcgcttagggtgcgagagg | |
| | | | tcccgggttcaaatcccgga | |
| | | | cgagccc | |

VIR622 Sequence:

| | | | | |
|---|---|---|---|---|
| VIR622 | VIR622 | ABE8-20- | ATGtccgaagtcgagttttcc | (SEQ |
| | SynV | 2a-GFP | catgagtactggatgagaca | ID |
| | deIG | tRNA Ile- | cgcattgactctcgcaaaga | NO: |
| | ABE8-20- | Hek2 | gggctcgagatgaacgcgag | 4021) |
| | 2a-GFP | gRNA | gtgcccgtgggggcagtact | |
| | tRNA | | cgtgctcaacaatcgcgtaa | |
| | Ile- | | tcggcgaaggttggaatagg | |
| | Hek2 | | gcaatcggactccacgaccc | |
| | gRNA | | cactgcacatgcggaaatca | |
| | | | tggcccttcgacagggaggg | |
| | | | cttgtgatgcagaattatcg | |
| | | | acttatcgatgcgacgctgt | |
| | | | acgtcacgtttgaaccttgc | |
| | | | gtaatgtgcgcgggagctat | |
| | | | gattcactcccgcattggac | |
| | | | gagttgtattcggtgttcgc | |
| | | | aacgccaagacgggtgccgc | |
| | | | aggttcactgatggacgtgc | |
| | | | tgcattacccaggcatgaac | |
| | | | caccgggtagaaatcacaga | |
| | | | aggcatattggcggacgaat | |
| | | | gtgcggcgctgttgtgttac | |
| | | | ttttttcgcatgcccaggcg | |
| | | | tgtctttaacgcccagaaaa | |
| | | | aagcacaatcctctactgac | |
| | | | tctggtggttcttctggtgg | |
| | | | ttctagcggcagcgagactc | |
| | | | ccgggacctcagagtccgcc | |
| | | | acacccgaaagttctggtgg | |
| | | | ttcttctggtggttctgaca | |
| | | | agaagtacagcatcggcctg | |
| | | | gccatcggcaccaactctgt | |
| | | | gggctgggccgtgatcaccg | |
| | | | acgagtacaaggtgcccagc | |
| | | | aagaaattcaaggtgctggg | |
| | | | caacaccgaccggcacagca | |
| | | | tcaagaagaacctgatcgga | |
| | | | gccctgctgttcgacagcgg | |
| | | | cgaaacagccgaggccaccc | |
| | | | ggctgaagagaaccgccaga | |
| | | | agaagatacaccagacggaa | |
| | | | gaaccggatctgctatctgc | |
| | | | aagagatcttcagcaacgag | |
| | | | atggccaaggtggacgacag | |
| | | | cttcttccacagactggaag | |
| | | | agtccttcctggtggaagag | |
| | | | gataagaagcacgagcggca | |
| | | | ccccatcttcggcaacatcg | |
| | | | tggacgaggtggcctaccac | |
| | | | gagaagtaccccaccatcta | |
| | | | ccacctgagaaagaaactgg | |
| | | | tggacagcaccgacaaggcc | |
| | | | gacctgcggctgatctatct | |
| | | | ggccctggcccacatgatca | |
| | | | agttccggggccacttcctg | |
| | | | atcgagggcgacctgaaccc | |
| | | | cgacaacagcgacgtggaca | |
| | | | agctgttcatccagctggtg | |
| | | | cagacctacaaccagctgtt | |
| | | | cgaggaaaaccccatcaacg | |
| | | | ccagcggcgtggacgccaag | |
| | | | gccatcctgtctgccagact | |
| | | | gagcaagagcagacggctgg | |
| | | | aaaatctgatcgcccagctg | |
| | | | cccggcgagaagaagaatgg | |
| | | | cctgttcggaaacctgattg | |
| | | | ccctgagcctgggcctgacc | |
| | | | cccaacttcaagagcaactt | |
| | | | cgacctggccgaggatgcca | |
| | | | aactgcagctgagcaaggac | |
| | | | acctacgacgacgacctgga | |
| | | | caacctgctggcccagatcg | |
| | | | gcgaccagtacgccgacctg | |
| | | | tttctggccgccaagaacct | |
| | | | gtccgacgccatcctgctga | |
| | | | gcgacatcctgagagtgaac | |
| | | | accgagatcaccaaggcccc | |
| | | | cctgagcgcctctatgatca | |
| | | | agagatacgacgagcaccac | |
| | | | caggacctgaccctgctgaa | |
| | | | agctctcgtgcggcagcagc | |
| | | | tgcctgagaagtacaaagag | |
| | | | attttcttcgaccagagcaa | |
| | | | gaacggctacgccggctaca | |
| | | | ttgacggcggagccagccag | |
| | | | gaagagttctacaagttcat | |
| | | | caagcccatcctggaaaaga | |
| | | | tggacggcaccgaggaactg | |
| | | | ctcgtgaagctgaacagaga | |
| | | | ggacctgctgcggaagcagc | |
| | | | ggaccttcgacaacggcagc | |
| | | | atcccccaccagatccacct | |
| | | | gggagagctgcacgccattc | |
| | | | tgcggcggcaggaagatttt | |
| | | | tacccattcctgaaggacaa | |
| | | | ccgggaaaagatcgagaaga | |
| | | | tcctgaccttccgcatcccc | |
| | | | tactacgtgggccctctggc | |
| | | | caggggaaacagcagattcg | |
| | | | cctggatgaccagaaagagc | |
| | | | gaggaaaccatcaccccctg | |
| | | | gaacttcgaggaagtggtgg | |
| | | | acaagggcgcttccgcccag | |
| | | | agcttcatcgagcggatgac | |
| | | | caacttcgataagaacctgc | |
| | | | ccaacgagaaggtgctgccc | |
| | | | aagcacagcctgctgtacga | |
| | | | gtacttcaccgtgtataacg | |
| | | | agctgaccaaagtgaaatac | |
| | | | gtgaccgagggaatgagaaa | |
| | | | gcccgccttcctgagcggcg | |
| | | | agcagaaaaaggccatcgtg | |
| | | | gacctgctgttcaagaccaa | |
| | | | ccggaaagtgaccgtgaagc | |
| | | | agctgaaagaggactacttc | |
| | | | aagaaaatcgagtgcttcga | |
| | | | ctccgtggaaatctccggcg | |
| | | | tggaagatcggttcaacgcc | |
| | | | tccctgggcacataccacga | |
| | | | tctgctgaaaattatcaagg | |
| | | | acaaggacttcctggacaat | |
| | | | gaggaaaacgaggacattct | |
| | | | ggaagatatcgtgctgaccc | |
| | | | tgacactgtttgaggacaga | |
| | | | gagatgatcgaggaacggct | |
| | | | gaaaacctatgcccacctgt | |
| | | | tcgacgacaaagtgatgaag | |
| | | | cagctgaagcggcggagata | |
| | | | caccggctggggcaggctga | |
| | | | gccggaagctgatcaacggc | |
| | | | atccgggacaagcagtccgg | |
| | | | caagacaatcctggatttcc | |
| | | | tgaagtccgacggcttcgcc | |
| | | | aacagaaacttcatgcagct | |
| | | | gatccacgacgacagcctga | |
| | | | cctttaaagaggacatccag | |
| | | | aaagcccaggtgtccggcca | |
| | | | gggcgatagcctgcacgagc | |
| | | | acattgccaatctggccggc | |
| | | | agccccgccattaagaaggg | |
| | | | catcctgcagacagtgaagg | |
| | | | tggtggacgagctcgtgaaa | |
| | | | gtgatgggccggcacaagcc | |
| | | | cgagaacatcgtgatcgaaa | |
| | | | tggccagagagaaccagacc | |
| | | | acccagaagggacagaagaa | |
| | | | cagccgcgagagaatgaagc | |
| | | | ggatcgaagagggcatcaaa | |
| | | | gagctgggcagccagatcct | |
| | | | gaaagaacaccccgtggaaa | |
| | | | acacccagctgcagaacgag | |
| | | | aagctgtacctgtactacct | |
| | | | gcagaatgggcgggatatgt | |
| | | | acgtggaccaggaactggac | |
| | | | atcaaccggctgtccgacta | |
| | | | cgatgtggaccatatcgtgc | |
| | | | ctcagagctttctgaaggac | |
| | | | gactccatcgacaacaaggt | |
| | | | gctgaccagaagcgacaaga | |
| | | | accggggcaagagcgacaac | |
| | | | gtgccctccgaagaggtcgt | |
| | | | gaagaagatgaagaactact | |
| | | | ggcggcagctgctgaacgcc | |
| | | | aagctgattacccagagaaa | |
| | | | gttcgacaatctgaccaagg | |
| | | | ccgagagaggcggcctgagc | |
| | | | gaactggataaggccggctt | |
| | | | catcaagagacagctggtgg | |
| | | | aaacccggcagatcacaaag | |
| | | | cacgtggcacagatcctgga | |
| | | | ctcccggatgaacactaagt | |
| | | | acgacgagaatgacaagctg | |
| | | | atccgggaagtgaaagtgat | |
| | | | caccctgaagtccaagctgg | |
| | | | tgtccgatttccggaaggat | |
| | | | ttccagttttacaaagtgcg | |
| | | | cgagatcaacaactaccacc | |
| | | | acgcccacgacgcctacctg | |
| | | | aacgccgtcgtgggaaccgc | |
| | | | cctgatcaaaaagtacccta | |
| | | | agctggaaagcgagttcgtg | |
| | | | tacggcgactacaaggtgta | |
| | | | cgacgtgcggaagatgatcg | |
| | | | ccaagagcgagcaggaaatc | |
| | | | ggcaaggctaccgccaagta | |
| | | | cttcttctacagcaacatca | |
| | | | tgaactttttcaagaccgag | |
| | | | attaccctggccaacggcga | |
| | | | gatccggaagcggcctctga | |
| | | | tcgagacaaacggcgaaacc | |
| | | | ggggagatcgtgtgggataa | |
| | | | gggccgggattttgccaccg | |
| | | | tgcggaaagtgctgagcatg | |
| | | | ccccaagtgaatatcgtgaa | |
| | | | aaagaccgaggtgcagacag | |
| | | | gcggcttcagcaaagagtct | |
| | | | atcctgcccaagaggaacag | |
| | | | cgataagctgatcgccagaa | |
| | | | agaaggactgggaccctaag | |
| | | | aagtacggcggcttcgacag | |
| | | | ccccaccgtggcctattctg | |
| | | | tgctggtggtggccaaagtg | |
| | | | gaaaagggcaagtccaagaa | |
| | | | actgaagagtgtgaaagagc | |
| | | | tgctggggatcaccatcatg | |
| | | | gaaagaagcagcttcgagaa | |
| | | | gaatcccatcgactttctgg | |
| | | | aagccaagggctacaaagaa | |
| | | | gtgaaaaaggacctgatcat | |
| | | | caagctgcctaagtactccc | |
| | | | tgttcgagctggaaaacggc | |
| | | | cggaagagaatgctggcctc | |
| | | | tgccggcgaactgcagaagg | |
| | | | gaaacgaactggccctgccc | |
| | | | tccaaatatgtgaacttcct | |
| | | | gtacctggccagccactatg | |
| | | | agaagctgaagggctccccc | |
| | | | gaggataatgagcagaaaca | |
| | | | gctgtttgtggaacagcaca | |
| | | | agcactacctggacgagatc | |
| | | | atcgagcagatcagcgagtt | |
| | | | ctccaagagagtgatcctgg | |
| | | | ccgacgctaatctggacaaa | |
| | | | gtgctgtccgcctacaacaa | |
| | | | gcaccgggataagcccatca | |
| | | | gagagcaggccgagaatatc | |
| | | | atccacctgtttaccctgac | |
| | | | caatctgggagcccctgccg | |
| | | | ccttcaagtactttgacacc | |
| | | | accatcgaccggaagaggta | |
| | | | caccagcaccaaagaggtgc | |
| | | | tggacgccaccctgatccac | |
| | | | cagagcatcaccggcctgta | |
| | | | cgagacacggatcgacctgt | |
| | | | ctcagctgggaggtgacgag | |
| | | | ggagctgataagcgcaccgc | |
| | | | cgatggttccgagttcgaaa | |
| | | | gccccaagaagaagaggaaa | |
| | | | gtcGAATTCGGCAGTGGAGA | |
| | | | GGGCAGAGGgtccCTGCTAA | |
| | | | CATGCGGTGACGTCGAGGAG | |
| | | | AATCCtGGcCCaatggtgag | |
| | | | caagggcgaggagctgttca | |
| | | | ccggggtggtgcccatcctg | |
| | | | gtcgagctggacggcgacgt | |
| | | | aaacggccacaagttcagcg | |
| | | | tgtccggcgagggcgagggc | |
| | | | gatgccacctacggcaagct | |
| | | | gaccctgaagttcatctgca | |
| | | | ccaccggcaagctgcccgtg | |
| | | | ccctggcccaccctcgtgac | |
| | | | caccctgacctacggcgtgc | |
| | | | agtgcttcagccgctacccc | |
| | | | gaccacatgaagcagcacga | |
| | | | cttcttcaagtccgccatgc | |
| | | | ccgaaggctacgtccaggag | |
| | | | cgcaccatcttcttcaagga | |
| | | | cgacggcaactacaagaccc | |
| | | | gcgccgaggtgaagttcgag | |
| | | | ggcgacaccctggtgaaccg | |
| | | | catcgagctgaagggcatcg | |
| | | | acttcaaggaggacggcaac | |
| | | | atcctggggcacaagctgga | |
| | | | gtacaactacaacagccaca | |
| | | | acgtctatatcatggccgac | |
| | | | aagcagaagaacggcatcaa | |
| | | | ggtgaacttcaagatccgcc | |
| | | | acaacatcgaggacggcagc | |
| | | | gtgcagctcgccgaccacta | |
| | | | ccagcagaacacccccatcg | |
| | | | gcgacggccccgtgctgctg | |
| | | | cccgacaaccactacctgag | |
| | | | cacccagtccgccctgagca | |
| | | | aagaccccaacgagaagcgc | |
| | | | gatcacatggtcctgctgga | |
| | | | gttcgtgaccgccgccggga | |
| | | | tcactctcggcatggacgag | |
| | | | ctgtacaagTAAGAAGTTGA | |
| | | | ATAACAAAATGCCGGAAATC | |
| | | | TACGGATTGTGTATATCCAT | |
| | | | CATGAAAAAAACTAACACCC | |
| | | | CTCCTTTCGAACCATCCCAA | |
| | | | ACgctccagtggcgcaatcg | |
| | | | gttagcgcgcggtacttata | |
| | | | agacagtgcacctgtgagca | |
| | | | atgccgaggttgtgagttca | |
| | | | agcctcacctggagcaGGAA | |
| | | | CACAAAGCATAGACTGCgtt | |
| | | | ttagagctaGAAAtagcaag | |
| | | | ttaaaataaggctagtccgt | |
| | | | tatcaacttgaaaaagtggc | |
| | | | accgagtcggtgcttCACAC | |
| | | | ACACAAgctccagtggcgca | |
| | | | atcggttagcgcgcggtact | |
| | | | tataagacagtgcaGCCgCG | |
| | | | AGGAAGGAGGTCTGAGGAGG | |
| | | | TCACTGcGGCcctgtgagca | |
| | | | atgccgaggttgtgagttca | |
| | | | agcctcacctggagcata | |

tRNA-qRNA-tRNA cassette (in VIR622):
gctccagtggcgcaatcggttagcgcgcggtacttataaga
cagtgcacctgtgagcaatgccgaggttgtgagttcaagc
ctcacctggagcaGGAACACAAAGCATAGACTGCgtttta
gagctaGAAAtagcaagttaaaataaggctagtccgttat
caacttgaaaaagtggcaccgagtcggtgcttCACACACA
CAAgctccagtggcgcaatcggttagcgcgcggtacttat
aagacagtgcaGCCgCGAGGAAGGAGGTCTGAGGAGGTCA
CTGcGGCcctgtgagcaatgccgaggttgtgagttcaagc
ctcacctggagca (SEQ ID NO: 4022)

### Example 6: Recombinant Rabies Virus Particle Gene Delivery—Additional Transgenes

[0783] A codon-optimized version of the SAD B19 ΔG RABV genome, referred to as SynV, was used to encode the base editor ABE8.20, where the therapeutic cargo (e.g., the base editor) replaced the G protein within the viral genome. U6-driven gRNAs, targeting HEK2 and ABCA4 loci, were transfected in trans into target 293T cells at the time of infection. Multiplicity of infection (MOI) of 32, 8, and 1, based on functional viral titers, were used. As shown in FIG. 5, A to G base editing was observed in 293T cells tranduced with RABV having a RABV genome encoding the ABE 8.20 base editor.

[0784] The SynV ΔG RABV genome was used to deliver several other base editors into 293T cells. As shown in FIG. 6, C to T base editing was observed in 293T cells tranduced with RABV having a RABV genome encoding one of several BE4 base editors.

[0785] In addition to the above described ΔG RABV genome, a ΔGL RABV genome was used to deliver the base editor ABE7.10. As shown in FIG. 7, A to G base editing was observed in 293T cells tranduced with RABV having a RABV genome encoding ABE7.10. One set of cells was additionally transfected by a plasmid encoding RABV L protein (virus+L).

[0786] In each of the above experiments represented by FIG. 5 to FIG. 7, robust base editing was observed in cells transduced with RABV expressing one of several different base editors. This robust activity was observed in both a ΔG and ΔGL RABV genome, at numerous MOIs, and at two distinct sites in the cell geneome (the HEK2 and ABCA4 loci).

### Example 7: Recombinant Rabies Virus Genome—Additional Genome Architectures

[0787] Example 4 described the use of a recombinant rabies virus genome in a ΔALL (i.e., ΔGLNPM) background. Additional RABV genome architectures were next tested to determine if transgene expression was possible. 293T cells and the cell line CE1.30 described above were used for viral production. The cells were transfected with rabies virus vectors in a ΔN, ΔP, ΔM, and ΔL background, each vector encoding a Cre recombinase-2A-GFP reporter gene. The 293T cells or CE1.30 cells were transfected with or without complementation of the missing gene (e.g., the ΔN vector was co-transfected with an N gene expressing vector, the ΔP vector was co-transfected with a P gene expressing vector, etc.). Flourescent images were taken 6 days post-transfection. As shown in FIG. 8, the CE1.30 cell line supported the growth of the ΔN, ΔP, ΔM, and ΔL replicons, with or without the additional complementation of the missing gene.

[0788] The cell supernatant of the above recited cell transfections was next applied to untranfected 293T cells to determine % viral entry of the rabies viruses. The % viral entry was measured by GFP flourescence. As shown in FIG. 9, % viral entry into cells was detected for each rabies virus vector tested in the CE1.30 cell line.

[0789] Further RABV genome architectures of ΔMGL and ΔPMGL were tested in a similar manner with viral production being done in the CE1.30 cell line. ΔGL, ΔMGL, ΔPMGL, and ΔALL vectors encoding Cre-2a-GFP as transgene were grown in CE1.30 cells, and titered on reporter cells to show functional delivery of both Cre and GFP mRNA. As shown in FIG. 10, viral entry was detetected in all RABV genome backgrounds, as measured by GFP and mScarlet flourescence. GFP transgene expression was also detected by flourescence, as shown in FIG. 11.

### Other Embodiments

[0790] From the foregoing description, it will be apparent that variations and modifications may be made to the invention described herein to adopt it to various usages and conditions. Such embodiments are also within the scope of the following claims.

[0791] The recitation of a listing of elements in any definition of a variable herein includes definitions of that variable as any single element or combination (or subcombination) of listed elements. The recitation of an embodiment herein includes that embodiment as any single embodiment or in combination with any other embodiments or portions thereof.

[0792] All patents and publications mentioned in this specification are herein incorporated by reference to the same extent as if each independent patent and publication was specifically and individually indicated to be incorporated by reference.

### L. SEQUENCE LISTING

| | SEQ | |
|---|---|---|
| Descrip- | ID | |
| tion | NO: | Sequence |
| Adenosine | 8 | MSEVEFSHEYWMRHALTLAKRARDEREVPV |
| Deaminase | | GAVLVLNNRVIGEGWNRAIGLHDPTAHAEI |
| Reference | | MALRQGGLVMQNYRLIDATLYVTFEPCVMC |
| Sequence | | AGAMIHSRIGRVVFGVRNAKTGAAGSLMDV |
| | | LHYPGMNHRVEITEGILADECAALLCYFFR |
| | | MPRQVFNAQKKAQSSTD |
| BhCas12b | 274 | GCCACCATGGCCCCAAAGAAGAAGCGGAAG |
| GGSGGS- | | GTCGGTATCCACGGAGTCCCAGCAGCCGCC |
| ABE8- | | ACCAGATCCTTCATCCTGAAGATCGAGCCC |
| Xten20 | | AACGAGGAAGTGAAGAAAGGCCTCTGGAAA |
| at P153 | | ACCCACGAGGTGCTGAACCACGGAATCGCC |
| poly- | | TACTACATGAATATCCTGAAGCTGATCCGG |
| nucleotide | | CAAGAGGCCATCTACGAGCACCACGAGCAG |
| | | GACCCCAAGAATCCCAAGAAGGTGTCCAAG |
| | | GCCGAGATCCAGGCCGAGCTGTGGGATTTC |
| | | GTGCTGAAGATGCAGAAGTGCAACAGCTTC |
| | | ACACACGAGGTGGACAAGGACGAGGTGTTC |
| | | AACATCCTGAGAGAGCTGTACGAGGAACTG |
| | | GTGCCCAGCAGCGTGGAAAAGAAGGGCGAA |
| | | GCCAACCAGCTGAGCAACAAGTTTCTGTAC |
| | | CCTCTGGTGGACCCCAACAGCCAGTCTGGA |
| | | AAGGGAACAGCCAGCAGCGGCAGAAAGCCC |
| | | AGATGGTACAACCTGAAGATTGCCGGCGAT |
| | | CCCGGAGGCTCTGGAGGAAGCTCCGAAGTC |
| | | GAGTTTTCCCATGAGTACTGGATGAGACAC |
| | | GCATTGACTCTCGCAAAGAGGGCTCGAGAT |
| | | GAACGCGAGGTGCCCGTGGGGGCAGTACTC |
| | | GTGCTCAACAATCGCGTAATCGGCGAAGGT |
| | | TGGAATAGGGCAATCGGACTCCACGACCCC |
| | | ACTGCACATGCGGAAATCATGGCCCTTCGA |
| | | CAGGGAGGGCTTGTGATGCAGAATTATCGA |
| | | CTTTATGATGCGACGCTGTACGTCACGTTT |
| | | GAACCTTGCGTAATGTGCGCGGGAGCTATG |
| | | ATTCACTCCCGCATTGGACGAGTTGTATTC |
| | | GGTGTTCGCAACGCCAAGACGGGTGCCGCA |
| | | GGTTCACTGATGGACGTGCTGCATCATCCA |
| | | GGCATGAACCACCGGGTAGAAATCACAGAA |
| | | GGCATATTGGCGGACGAATGTGCGGCGCTG |
| | | TTGTGTCGTTTTTTTCGCATGCCCAGGCGG |
| | | GTCTTTAACGCCCAGAAAAAAGCACAATCC |
| | | TCTACTGACGGCTCTTCTGGATCTGAAACA |
| | | CCTGGCACAAGCGAGAGCGCCACCCCTGAG |
| | | AGCTCTGGCTCCTGGGAAGAAGAGAAGAAG |
| | | AAGTGGGAAGAAGATAAGAAAAAGGACCCG |
| | | CTGGCCAAGATCCTGGGCAAGCTGGCTGAG |
| | | TACGGACTGATCCCTCTGTTCATCCCCTAC |
| | | ACCGACAGCAACGAGCCCATCGTGAAAGAA |
| | | ATCAAGTGGATGGAAAAGTCCCGGAACCAG |
| | | AGCGTGCGGCGGCTGGATAAGGACATGTTC |
| | | ATTCAGGCCCTGGAACGGTTCCTGAGCTGG |
| | | GAGAGCTGGAACCTGAAAGTGAAAGAGGAA |
| | | TACGAGAAGGTCGAGAAAGAGTACAAGACC |
| | | CTGGAAGAGAGGATCAAAGAGGACATCCAG |
| | | GCTCTGAAGGCTCTGGAACAGTATGAGAAA |
| | | GAGCGGCAAGAACAGCTGCTGCGGGACACC |
| | | CTGAACACCAACGAGTACCGGCTGAGCAAG |
| | | AGAGGCCTTAGAGGCTGGCGGGAAATCATC |
| | | CAGAAATGGCTGAAAATGGACGAGAACGAG |
| | | CCCTCCGAGAAGTACCTGGAAGTGTTCAAG |
| | | GACTACCAGCGGAAGCACCCTAGAGAGGCC |
| | | GGCGATTACAGCGTGTACGAGTTCCTGTCC |
| | | AAGAAAGAGAACCACTTCATCTGGCGGAAT |
| | | CACCCTGAGTACCCCTACCTGTACGCCACC |
| | | TTCTGCGAGATCGACAAGAAAAAGAAGGAC |
| | | GCCAAGCAGCAGGCCACCTTCACACTGGCC |
| | | GATCCTATCAATCACCCTCTGTGGGTCCGA |
| | | TTCGAGGAAAGAAGCGGCAGCAACCTGAAC |
| | | AAGTACAGAATCCTGACCGAGCAGCTGCAC |
| | | ACCGAGAAGCTGAAGAAAAAGCTGACAGTG |
| | | CAGCTGGACCGGCTGATCTACCCTACAGAA |
| | | TCTGGCGGCTGGGAAGAGAAGGGCAAAGTG |
| | | GACATTGTGCTGCTGCCCAGCCGGCAGTTC |
| | | TACAACCAGATCTTCCTGGACATCGAGGAA |
| | | AAGGGCAAGCACGCCTTCACCTACAAGGAT |
| | | GAGAGCATCAAGTTCCCTCTGAAGGGCACA |
| | | CTCGGCGGAGCCAGAGTGCAGTTCGACAGA |
| | | GATCACCTGAGAAGATACCCTCACAAGGTG |
| | | GAAAGCGGCAACGTGGGCAGAATCTACTTC |
| | | AACATGACCGTGAACATCGAGCCTACAGAG |
| | | TCCCCAGTGTCCAAGTCTCTGAAGATCCAC |
| | | CGGGACGACTTCCCCAAGGTGGTCAACTTC |
| | | AAGCCCAAAGAACTGACCGAGTGGATCAAG |
| | | GACAGCAAGGGCAAGAAACTGAAGTCCGGC |
| | | ATCGAGTCCCTGGAAATCGGCCTGAGAGTG |
| | | ATGAGCATCGACCTGGGACAGAGACAGGCC |
| | | GCTGCCGCCTCTATTTTCGAGGTGGTGGAT |
| | | CAGAAGCCCGACATCGAAGGCAAGCTGTTT |
| | | TTCCCAATCAAGGGCACCGAGCTGTATGCC |
| | | GTGCACAGAGCCAGCTTCAACATCAAGCTG |
| | | CCCGGCGAGACACTGGTCAAGAGCAGAGAA |
| | | GTGCTGCGGAAGGCCAGAGAGGACAATCTG |
| | | AAACTGATGAACCAGAAGCTCAACTTCCTG |
| | | CGGAACGTGCTGCACTTCCAGCAGTTCGAG |
| | | GACATCACCGAGAGAGAGAAGCGGGTCACC |
| | | AAGTGGATCAGCAGACAAGAGAACAGCGAC |
| | | GTGCCCCTGGTGTACCAGGATGAGCTGATC |
| | | CAGATCCGCGAGCTGATGTACAAGCCTTAC |
| | | AAGGACTGGGTCGCCTTCCTGAAGCAGCTC |
| | | CACAAGAGACTGGAAGTCGAGATCGGCAAA |
| | | GAAGTGAAGCACTGGCGGAAGTCCCTGAGC |
| | | GACGGAAGAAAGGGCCTGTACGGCATCTCC |
| | | CTGAAGAACATCGACGAGATCGATCGGACC |
| | | CGGAAGTTCCTGCTGAGATGGTCCCTGAGG |
| | | CCTACCGAACCTGGCGAAGTGCGTAGACTG |
| | | GAACCCGGCCAGAGATTCGCCATCGACCAG |
| | | CTGAATCACCTGAACGCCCTGAAAGAAGAT |
| | | CGGCTGAAGAAGATGGCCAACACCATCATC |
| | | ATGCACGCCCTGGGCTACTGCTACGACGTG |
| | | CGGAAGAAGAAATGGCAGGCTAAGAACCCC |
| | | GCCTGCCAGATCATCCTGTTCGAGGATCTG |
| | | AGCAACTACAACCCCTACGAGGAAAGGTCC |
| | | CGCTTCGAGAACAGCAAGCTCATGAAGTGG |
| | | TCCAGACGCGAGATCCCCAGACAGGTTGCA |
| | | CTGCAGGGCGAGATCTATGGCCTGCAAGTG |
| | | GGAGAAGTGGGCGCTCAGTTCAGCAGCAGA |
| | | TTCCACGCCAAGACAGGCAGCCCTGGCATC |
| | | AGATGTAGCGTCGTGACCAAAGAGAAGCTG |
| | | CAGGACAATCGGTTCTTCAAGAATCTGCAG |
| | | AGAGAGGGCAGACTGACCCTGGACAAAATC |
| | | GCCGTGCTGAAAGAGGGCGATCTGTACCCA |
| | | GACAAAGGCGGCGAGAAGTTCATCAGCCTG |
| | | AGCAAGGATCGGAAGTGCGTGACCACACAC |
| | | GCCGACATCAACGCCGCTCAGAACCTGCAG |
| | | AAGCGGTTCTGGACAAGAACCCACGGCTTC |
| | | TACAAGGTGTACTGCAAGGCCTACCAGGTG |
| | | GACGGCCAGACCGTGTACATCCCTGAGAGC |
| | | AAGGACCAGAAGCAGAAGATCATCGAAGAG |
| | | TTCGGCGAGGGCTACTTCATTCTGAAGGAC |
| | | GGGGTGTACGAATGGGTCAACGCCGGCAAG |
| | | CTGAAAATCAAGAAGGGCAGCTCCAAGCAG |
| | | AGCAGCAGCGAGCTGGTGGATAGCGACATC |
| | | CTGAAAGACAGCTTCGACCTGGCCTCCGAG |
| | | CTGAAAGGCGAAAAGCTGATGCTGTACAGG |
| | | GACCCCAGCGGCAATGTGTTCCCCAGCGAC |
| | | AAATGGATGGCCGCTGGCGTGTTCTTCGGA |
| | | AAGCTGGAACGCATCCTGATCAGCAAGCTG |
| | | ACCAACCAGTACTCCATCAGCACCATCGAG |
| | | GACGACAGCAGCAAGCAGTCTATGAAAAGG |
| | | CCGGCGGCCACGAAAAAGGCCGGCCAGGCA |
| | | AAAAAGAAAAAGGGATCCTACCCATACGAT |
| | | GTTCCAGATTACGCTTATCCCTACGACGTG |
| | | CCTGATTATGCATACCCATATGATGTCCCC |
| | | GACTATGCCTAA |
| BhCas12b | 275 | MAPKKKRKVGIHGVPAAATRSFILKIEPNE |
| GGSGGS- | | EVKKGLWKTHEVLNHGIAYYMNILKLIRQE |
| ABE8- | | AIYEHHEQDPKNPKKVSKAEIQAELWDFVL |
| Xten20 at | | KMQKCNSFTHEVDKDEVFNILRELYEELVP |
| P153 | | SSVEKKGEANQLSNKFLYPLVDPNSQSGKG |
| polypeptide | | TASSGRKPRWYNLKIAGDPGGSGGSSEVEF |
| | | SHEYWMRHALTLAKRARDEREVPVGAVLVL |
| | | NNRVIGEGWNRAIGLHDPTAHAEIMALRQG |
| | | GLVMQNYRLYDATLYVTFEPCVMCAGAMIH |
| | | SRIGRVVFGVRNAKTGAAGSLMDVLHHPGM |
| | | NHRVEITEGILADECAALLCRFFRMPRRVF |
| | | NAQKKAQSSTDGSSGSETPGTSESATPESS |
| | | GSWEEEKKKWEEDKKKDPLAKILGKLAEYG |
| | | LIPLFIPYTDSNEPIVKEIKWMEKSRNQSV |
| | | RRLDKDMFIQALERFLSWESWNLKVKEEYE |
| | | KVEKEYKTLEERIKEDIQALKALEQYEKER |
| | | QEQLLRDTLNTNEYRLSKRGLRGWREIIQK |
| | | WLKMDENEPSEKYLEVFKDYQRKHPREAGD |
| | | YSVYEFLSKKENHFIWRNHPEYPYLYATFC |
| | | EIDKKKKDAKQQATFTLADPINHPLWVRFE |
| | | ERSGSNLNKYRILTEQLHTEKLKKKLTVQL |
| | | DRLIYPTESGGWEEKGKVDIVLLPSRQFYN |
| | | QIFLDIEEKGKHAFTYKDESIKFPLKGTLG |
| | | GARVQFDRDHLRRYPHKVESGNVGRIYFNM |
| | | TVNIEPTESPVSKSLKIHRDDFPKWNFKPK |
| | | ELTEWIKDSKGKKLKSGIESLEIGLRVMSI |
| | | DLGQRQAAAASIFEVVDQKPDIEGKLFFPI |
| | | KGTELYAVHRASFNIKLPGETLVKSREVLR |
| | | KAREDNLKLMNQKLNFLRNVLHFQQFEDIT |
| | | EREKRVTKWISRQENSDVPLVYQDELIQIR |
| | | ELMYKPYKDWVAFLKQLHKRLEVEIGKEVK |
| | | HWRKSLSDGRKGLYGISLKNIDEIDRTRKF |
| | | LLRWSLRPTEPGEVRRLEPGQRFAIDQLNH |
| | | LNALKEDRLKKMANTIIMHALGYCYDVRKK |
| | | KWQAKNPACQIILFEDLSNYNPYEERSRFE |
| | | NSKLMKWSRREIPRQVALQGEIYGLQVGEV |
| | | GAQFSSRFHAKTGSPGIRCSWTKEKLQDNR |
| | | FFKNLQREGRLTLDKIAVLKEGDLYPDKGG |
| | | EKFISLSKDRKCVTTHADINAAQNLQKRFW |
| | | TRTHGFYKVYCKAYQVDGQTVYIPESKDQK |
| | | QKIIEEFGEGYFILKDGVYEWVNAGKLKIK |
| | | KGSSKQSSSELVDSDILKDSFDLASELKGE |
| | | KLMLYRDPSGNVFPSDKWMAAGVFFGKLER |
| | | ILISKLTNQYSISTIEDDSSKQSMKRPAAT |
| | | KKAGQAKKKKGSYPYDVPDYAYPYDVPDYA |
| | | YPYDVPDYA |
| BhCas12b | 276 | GCCACCATGGCCCCAAAGAAGAAGCGGAAG |
| GGSGGS- | | GTCGGTATCCACGGAGTCCCAGCAGCCGCC |
| ABE8- | | ACCAGATCCTTCATCCTGAAGATCGAGCCC |
| Xten20 | | AACGAGGAAGTGAAGAAAGGCCTCTGGAAA |
| at K255 | | ACCCACGAGGTGCTGAACCACGGAATCGCC |
| poly- | | TACTACATGAATATCCTGAAGCTGATCCGG |
| nucleotide | | CAAGAGGCCATCTACGAGCACCACGAGCAG |
| | | GACCCCAAGAATCCCAAGAAGGTGTCCAAG |
| | | GCCGAGATCCAGGCCGAGCTGTGGGATTTC |
| | | GTGCTGAAGATGCAGAAGTGCAACAGCTTC |
| | | ACACACGAGGTGGACAAGGACGAGGTGTTC |
| | | AACATCCTGAGAGAGCTGTACGAGGAACTG |
| | | GTGCCCAGCAGCGTGGAAAAGAAGGGCGAA |
| | | GCCAACCAGCTGAGCAACAAGTTTCTGTAC |
| | | CCTCTGGTGGACCCCAACAGCCAGTCTGGA |
| | | AAGGGAACAGCCAGCAGCGGCAGAAAGCCC |
| | | AGATGGTACAACCTGAAGATTGCCGGCGAT |
| | | CCCTCCTGGGAAGAAGAGAAGAAGAAGTGG |
| | | GAAGAAGATAAGAAAAAGGACCCGCTGGCC |
| | | AAGATCCTGGGCAAGCTGGCTGAGTACGGA |
| | | CTGATCCCTCTGTTCATCCCCTACACCGAC |
| | | AGCAACGAGCCCATCGTGAAAGAAATCAAG |
| | | TGGATGGAAAAGTCCCGGAACCAGAGCGTG |
| | | CGGCGGCTGGATAAGGACATGTTCATTCAG |
| | | GCCCTGGAACGGTTCCTGAGCTGGGAGAGC |
| | | TGGAACCTGAAAGTGAAAGAGGAATACGAG |
| | | AAGGTCGAGAAAGAGTACAAGACCCTGGAA |
| | | GAGAGGATCAAAGGAGGCTCTGGAGGAAGC |
| | | TCCGAAGTCGAGTTTTCCCATGAGTACTGG |
| | | ATGAGACACGCATTGACTCTCGCAAAGAGG |
| | | GCTCGAGATGAACGCGAGGTGCCCGTGGGG |
| | | GCAGTACTCGTGCTCAACAATCGCGTAATC |
| | | GGCGAAGGTTGGAATAGGGCAATCGGACTC |
| | | CACGACCCCACTGCACATGCGGAAATCATG |
| | | GCCCTTCGACAGGGAGGGCTTGTGATGCAG |
| | | AATTATCGACTTTATGATGCGACGCTGTAC |
| | | GTCACGTTTGAACCTTGCGTAATGTGCGCG |
| | | GGAGCTATGATTCACTCCCGCATTGGACGA |
| | | GTTGTATTCGGTGTTCGCAACGCCAAGACG |
| | | GGTGCCGCAGGTTCACTGATGGACGTGCTG |
| | | CATCATCCAGGCATGAACCACCGGGTAGAA |
| | | ATCACAGAAGGCATATTGGCGGACGAATGT |
| | | GCGGCGCTGTTGTGTCGTTTTTTTCGCATG |
| | | CCCAGGCGGGTCTTTAACGCCCAGAAAAAA |
| | | GCACAATCCTCTACTGACGGCTCTTCTGGA |
| | | TCTGAAACACCTGGCACAAGCGAGAGCGCC |
| | | ACCCCTGAGAGCTCTGGCGAGGACATCCAG |
| | | GCTCTGAAGGCTCTGGAACAGTATGAGAAA |
| | | GAGCGGCAAGAACAGCTGCTGCGGGACACC |
| | | CTGAACACCAACGAGTACCGGCTGAGCAAG |
| | | AGAGGCCTTAGAGGCTGGCGGGAAATCATC |
| | | CAGAAATGGCTGAAAATGGACGAGAACGAG |
| | | CCCTCCGAGAAGTACCTGGAAGTGTTCAAG |
| | | GACTACCAGCGGAAGCACCCTAGAGAGGCC |
| | | GGCGATTACAGCGTGTACGAGTTCCTGTCC |
| | | AAGAAAGAGAACCACTTCATCTGGCGGAAT |
| | | CACCCTGAGTACCCCTACCTGTACGCCACC |
| | | TTCTGCGAGATCGACAAGAAAAAGAAGGAC |
| | | GCCAAGCAGCAGGCCACCTTCACACTGGCC |
| | | GATCCTATCAATCACCCTCTGTGGGTCCGA |
| | | TTCGAGGAAAGAAGCGGCAGCAACCTGAAC |
| | | AAGTACAGAATCCTGACCGAGCAGCTGCAC |
| | | ACCGAGAAGCTGAAGAAAAAGCTGACAGTG |
| | | CAGCTGGACCGGCTGATCTACCCTACAGAA |
| | | TCTGGCGGCTGGGAAGAGAAGGGCAAAGTG |
| | | GACATTGTGCTGCTGCCCAGCCGGCAGTTC |
| | | TACAACCAGATCTTCCTGGACATCGAGGAA |
| | | AAGGGCAAGCACGCCTTCACCTACAAGGAT |
| | | GAGAGCATCAAGTTCCCTCTGAAGGGCACA |
| | | CTCGGCGGAGCCAGAGTGCAGTTCGACAGA |
| | | GATCACCTGAGAAGATACCCTCACAAGGTG |
| | | GAAAGCGGCAACGTGGGCAGAATCTACTTC |
| | | AACATGACCGTGAACATCGAGCCTACAGAG |
| | | TCCCCAGTGTCCAAGTCTCTGAAGATCCAC |
| | | CGGGACGACTTCCCCAAGGTGGTCAACTTC |
| | | AAGCCCAAAGAACTGACCGAGTGGATCAAG |
| | | GACAGCAAGGGCAAGAAACTGAAGTCCGGC |
| | | ATCGAGTCCCTGGAAATCGGCCTGAGAGTG |
| | | ATGAGCATCGACCTGGGACAGAGACAGGCC |
| | | GCTGCCGCCTCTATTTTCGAGGTGGTGGAT |
| | | CAGAAGCCCGACATCGAAGGCAAGCTGTTT |
| | | TTCCCAATCAAGGGCACCGAGCTGTATGCC |
| | | GTGCACAGAGCCAGCTTCAACATCAAGCTG |
| | | CCCGGCGAGACACTGGTCAAGAGCAGAGAA |
| | | GTGCTGCGGAAGGCCAGAGAGGACAATCTG |
| | | AAACTGATGAACCAGAAGCTCAACTTCCTG |
| | | CGGAACGTGCTGCACTTCCAGCAGTTCGAG |
| | | GACATCACCGAGAGAGAGAAGCGGGTCACC |
| | | AAGTGGATCAGCAGACAAGAGAACAGCGAC |
| | | GTGCCCCTGGTGTACCAGGATGAGCTGATC |
| | | CAGATCCGCGAGCTGATGTACAAGCCTTAC |
| | | AAGGACTGGGTCGCCTTCCTGAAGCAGCTC |
| | | CACAAGAGACTGGAAGTCGAGATCGGCAAA |
| | | GAAGTGAAGCACTGGCGGAAGTCCCTGAGC |
| | | GACGGAAGAAAGGGCCTGTACGGCATCTCC |
| | | CTGAAGAACATCGACGAGATCGATCGGACC |
| | | CGGAAGTTCCTGCTGAGATGGTCCCTGAGG |
| | | CCTACCGAACCTGGCGAAGTGCGTAGACTG |
| | | GAACCCGGCCAGAGATTCGCCATCGACCAG |
| | | CTGAATCACCTGAACGCCCTGAAAGAAGAT |
| | | CGGCTGAAGAAGATGGCCAACACCATCATC |
| | | ATGCACGCCCTGGGCTACTGCTACGACGTG |
| | | CGGAAGAAGAAATGGCAGGCTAAGAACCCC |
| | | GCCTGCCAGATCATCCTGTTCGAGGATCTG |
| | | AGCAACTACAACCCCTACGAGGAAAGGTCC |
| | | CGCTTCGAGAACAGCAAGCTCATGAAGTGG |
| | | TCCAGACGCGAGATCCCCAGACAGGTTGCA |
| | | CTGCAGGGCGAGATCTATGGCCTGCAAGTG |
| | | GGAGAAGTGGGCGCTCAGTTCAGCAGCAGA |
| | | TTCCACGCCAAGACAGGCAGCCCTGGCATC |
| | | AGATGTAGCGTCGTGACCAAAGAGAAGCTG |
| | | CAGGACAATCGGTTCTTCAAGAATCTGCAG |
| | | AGAGAGGGCAGACTGACCCTGGACAAAATC |
| | | GCCGTGCTGAAAGAGGGCGATCTGTACCCA |
| | | GACAAAGGCGGCGAGAAGTTCATCAGCCTG |
| | | AGCAAGGATCGGAAGTGCGTGACCACACAC |
| | | GCCGACATCAACGCCGCTCAGAACCTGCAG |
| | | AAGCGGTTCTGGACAAGAACCCACGGCTTC |
| | | TACAAGGTGTACTGCAAGGCCTACCAGGTG |
| | | GACGGCCAGACCGTGTACATCCCTGAGAGC |
| | | AAGGACCAGAAGCAGAAGATCATCGAAGAG |
| | | TTCGGCGAGGGCTACTTCATTCTGAAGGAC |
| | | GGGGTGTACGAATGGGTCAACGCCGGCAAG |
| | | CTGAAAATCAAGAAGGGCAGCTCCAAGCAG |
| | | AGCAGCAGCGAGCTGGTGGATAGCGACATC |
| | | CTGAAAGACAGCTTCGACCTGGCCTCCGAG |
| | | CTGAAAGGCGAAAAGCTGATGCTGTACAGG |
| | | GACCCCAGCGGCAATGTGTTCCCCAGCGAC |
| | | AAATGGATGGCCGCTGGCGTGTTCTTCGGA |
| | | AAGCTGGAACGCATCCTGATCAGCAAGCTG |
| | | ACCAACCAGTACTCCATCAGCACCATCGAG |
| | | GACGACAGCAGCAAGCAGTCTATGAAAAGG |
| | | CCGGCGGCCACGAAAAAGGCCGGCCAGGCA |
| | | AAAAAGAAAAAGGGATCCTACCCATACGAT |
| | | GTTCCAGATTACGCTTATCCCTACGACGTG |
| | | CCTGATTATGCATACCCATATGATGTCCCC |
| | | GACTATGCCTAA |
| BhCas12b | 277 | MAPKKKRKVGIHGVPAAATRSFILKIEPNE |
| GGSGGS- | | EVKKGLWKTHEVLNHGIAYYMNILKLIRQE |
| ABE8- | | AIYEHHEQDPKNPKKVSKAEIQAELWDFVL |
| Xten20 | | KMQKCNSFTHEVDKDEVFNILRELYEELVP |
| at K255 | | SSVEKKGEANQLSNKFLYPLVDPNSQSGKG |
| polypeptide | | TASSGRKPRWYNLKIAGDPSWEEEKKKWEE |
| | | DKKKDPLAKILGKLAEYGLIPLFIPYTDSN |
| | | EPIVKEIKWMEKSRNQSVRRLDKDMFIQAL |
| | | ERFLSWESWNLKVKEEYEKVEKEYKTLEER |
| | | IKGGSGGSSEVEFSHEYWMRHALTLAKRAR |
| | | DEREVPVGAVLVLNNRVIGEGWNRAIGLHD |
| | | PTAHAEIMALRQGGLVMQNYRLYDATLYVT |
| | | FEPCVMCAGAMIHSRIGRVVFGVRNAKTGA |
| | | AGSLMDVLHHPGMNHRVEITEGILADECAA |
| | | LLCRFFRMPRRVFNAQKKAQSSTDGSSGSE |
| | | TPGTSESATPESSGEDIQALKALEQYEKER |
| | | QEQLLRDTLNTNEYRLSKRGLRGWREIIQK |
| | | WLKMDENEPSEKYLEVFKDYQRKHPREAGD |
| | | YSVYEFLSKKENHFIWRNHPEYPYLYATFC |
| | | EIDKKKKDAKQQATFTLADPINHPLWVRFE |
| | | ERSGSNLNKYRILTEQLHTEKLKKKLTVQL |
| | | DRLIYPTESGGWEEKGKVDIVLLPSRQFYN |
| | | QIFLDIEEKGKHAFTYKDESIKFPLKGTLG |
| | | GARVQFDRDHLRRYPHKVESGNVGRIYFNM |
| | | TVNIEPTESPVSKSLKIHRDDFPKVVNFKP |
| | | KELTEWIKDSKGKKLKSGIESLEIGLRVMS |
| | | IDLGQRQAAAASIFEWDQKPDIEGKLFFPI |
| | | KGTELYAVHRASFNIKLPGETLVKSREVLR |
| | | KAREDNLKLMNQKLNFLRNVLHFQQFEDIT |
| | | EREKRVTKWISRQENSDVPLVYQDELIQIR |
| | | ELMYKPYKDWVAFLKQLHKRLEVEIGKEVK |
| | | HWRKSLSDGRKGLYGISLKNIDEIDRTRKF |
| | | LLRWSLRPTEPGEVRRLEPGQRFAIDQLNH |
| | | LNALKEDRLKKMANTIIMHALGYCYDVRKK |
| | | KWQAKNPACQIILFEDLSNYNPYEERSRFE |
| | | NSKLMKWSRREIPRQVALQGEIYGLQVGEV |
| | | GAQFSSRFHAKTGSPGIRCSVVTKEKLQDN |
| | | RFFKNLQREGRLTLDKIAVLKEGDLYPDKG |
| | | GEKFISLSKDRKCVTTHADINAAQNLQKRF |
| | | WTRTHGFYKVYCKAYQVDGQTVYIPESKDQ |
| | | KQKIIEEFGEGYFILKDGVYEWVNAGKLKI |
| | | KKGSSKQSSSELVDSDILKDSFDLASELKG |
| | | EKLMLYRDPSGNVFPSDKWMAAGVFFGKLE |
| | | RILISKLTNQYSISTIEDDSSKQSMKRPAA |
| | | TKKAGQAKKKKGSYPYDVPDYAYPYDVPDY |
| | | AYPYDVPDYA |
| BhCas12b | 278 | GCCACCATGGCCCCAAAGAAGAAGCGGAAG |
| GGSGGS- | | GTCGGTATCCACGGAGTCCCAGCAGCCGCC |
| ABE8- | | ACCAGATCCTTCATCCTGAAGATCGAGCCC |
| Xten20 | | AACGAGGAAGTGAAGAAAGGCCTCTGGAAA |
| at D306 | | ACCCACGAGGTGCTGAACCACGGAATCGCC |
| poly- | | TACTACATGAATATCCTGAAGCTGATCCGG |
| nucleotide | | CAAGAGGCCATCTACGAGCACCACGAGCAG |
| | | GACCCCAAGAATCCCAAGAAGGTGTCCAAG |
| | | GCCGAGATCCAGGCCGAGCTGTGGGATTTC |
| | | GTGCTGAAGATGCAGAAGTGCAACAGCTTC |
| | | ACACACGAGGTGGACAAGGACGAGGTGTTC |
| | | AACATCCTGAGAGAGCTGTACGAGGAACTG |
| | | GTGCCCAGCAGCGTGGAAAAGAAGGGCGAA |
| | | GCCAACCAGCTGAGCAACAAGTTTCTGTAC |
| | | CCTCTGGTGGACCCCAACAGCCAGTCTGGA |
| | | AAGGGAACAGCCAGCAGCGGCAGAAAGCCC |
| | | AGATGGTACAACCTGAAGATTGCCGGCGAT |
| | | CCCTCCTGGGAAGAAGAGAAGAAGAAGTGG |
| | | GAAGAAGATAAGAAAAAGGACCCGCTGGCC |
| | | AAGATCCTGGGCAAGCTGGCTGAGTACGGA |
| | | CTGATCCCTCTGTTCATCCCCTACACCGAC |
| | | AGCAACGAGCCCATCGTGAAAGAAATCAAG |
| | | TGGATGGAAAAGTCCCGGAACCAGAGCGTG |
| | | CGGCGGCTGGATAAGGACATGTTCATTCAG |
| | | GCCCTGGAACGGTTCCTGAGCTGGGAGAGC |
| | | TGGAACCTGAAAGTGAAAGAGGAATACGAG |
| | | AAGGTCGAGAAAGAGTACAAGACCCTGGAA |
| | | GAGAGGATCAAAGAGGACATCCAGGCTCTG |
| | | AAGGCTCTGGAACAGTATGAGAAAGAGCGG |
| | | CAAGAACAGCTGCTGCGGGACACCCTGAAC |
| | | ACCAACGAGTACCGGCTGAGCAAGAGAGGC |
| | | CTTAGAGGCTGGCGGGAAATCATCCAGAAA |
| | | TGGCTGAAAATGGACGGAGGCTCTGGAGGA |
| | | AGCTCCGAAGTCGAGTTTTCCCATGAGTAC |
| | | TGGATGAGACACGCATTGACTCTCGCAAAG |
| | | AGGGCTCGAGATGAACGCGAGGTGCCCGTG |
| | | GGGGCAGTACTCGTGCTCAACAATCGCGTA |
| | | ATCGGCGAAGGTTGGAATAGGGCAATCGGA |
| | | CTCCACGACCCCACTGCACATGCGGAAATC |
| | | ATGGCCCTTCGACAGGGAGGGCTTGTGATG |
| | | CAGAATTATCGACTTTATGATGCGACGCTG |
| | | TACGTCACGTTTGAACCTTGCGTAATGTGC |
| | | GCGGGAGCTATGATTCACTCCCGCATTGGA |
| | | CGAGTTGTATTCGGTGTTCGCAACGCCAAG |
| | | ACGGGTGCCGCAGGTTCACTGATGGACGTG |
| | | CTGCATCATCCAGGCATGAACCACCGGGTA |
| | | GAAATCACAGAAGGCATATTGGCGGACGAA |
| | | TGTGCGGCGCTGTTGTGTCGTTTTTTTCGC |
| | | ATGCCCAGGCGGGTCTTTAACGCCCAGAAA |
| | | AAAGCACAATCCTCTACTGACGGCTCTTCT |
| | | GGATCTGAAACACCTGGCACAAGCGAGAGC |
| | | GCCACCCCTGAGAGCTCTGGCGAGAACGAG |
| | | CCCTCCGAGAAGTACCTGGAAGTGTTCAAG |
| | | GACTACCAGCGGAAGCACCCTAGAGAGGCC |
| | | GGCGATTACAGCGTGTACGAGTTCCTGTCC |
| | | AAGAAAGAGAACCACTTCATCTGGCGGAAT |
| | | CACCCTGAGTACCCCTACCTGTACGCCACC |
| | | TTCTGCGAGATCGACAAGAAAAAGAAGGAC |
| | | GCCAAGCAGCAGGCCACCTTCACACTGGCC |
| | | GATCCTATCAATCACCCTCTGTGGGTCCGA |
| | | TTCGAGGAAAGAAGCGGCAGCAACCTGAAC |
| | | AAGTACAGAATCCTGACCGAGCAGCTGCAC |
| | | ACCGAGAAGCTGAAGAAAAAGCTGACAGTG |
| | | CAGCTGGACCGGCTGATCTACCCTACAGAA |
| | | TCTGGCGGCTGGGAAGAGAAGGGCAAAGTG |
| | | GACATTGTGCTGCTGCCCAGCCGGCAGTTC |
| | | TACAACCAGATCTTCCTGGACATCGAGGAA |
| | | AAGGGCAAGCACGCCTTCACCTACAAGGAT |
| | | GAGAGCATCAAGTTCCCTCTGAAGGGCACA |
| | | CTCGGCGGAGCCAGAGTGCAGTTCGACAGA |
| | | GATCACCTGAGAAGATACCCTCACAAGGTG |
| | | GAAAGCGGCAACGTGGGCAGAATCTACTTC |
| | | AACATGACCGTGAACATCGAGCCTACAGAG |
| | | TCCCCAGTGTCCAAGTCTCTGAAGATCCAC |
| | | CGGGACGACTTCCCCAAGGTGGTCAACTTC |
| | | AAGCCCAAAGAACTGACCGAGTGGATCAAG |
| | | GACAGCAAGGGCAAGAAACTGAAGTCCGGC |
| | | ATCGAGTCCCTGGAAATCGGCCTGAGAGTG |
| | | ATGAGCATCGACCTGGGACAGAGACAGGCC |
| | | GCTGCCGCCTCTATTTTCGAGGTGGTGGAT |
| | | CAGAAGCCCGACATCGAAGGCAAGCTGTTT |
| | | TTCCCAATCAAGGGCACCGAGCTGTATGCC |
| | | GTGCACAGAGCCAGCTTCAACATCAAGCTG |
| | | CCCGGCGAGACACTGGTCAAGAGCAGAGAA |
| | | GTGCTGCGGAAGGCCAGAGAGGACAATCTG |
| | | AAACTGATGAACCAGAAGCTCAACTTCCTG |
| | | CGGAACGTGCTGCACTTCCAGCAGTTCGAG |
| | | GACATCACCGAGAGAGAGAAGCGGGTCACC |
| | | AAGTGGATCAGCAGACAAGAGAACAGCGAC |
| | | GTGCCCCTGGTGTACCAGGATGAGCTGATC |
| | | CAGATCCGCGAGCTGATGTACAAGCCTTAC |
| | | AAGGACTGGGTCGCCTTCCTGAAGCAGCTC |
| | | CACAAGAGACTGGAAGTCGAGATCGGCAAA |
| | | GAAGTGAAGCACTGGCGGAAGTCCCTGAGC |
| | | GACGGAAGAAAGGGCCTGTACGGCATCTCC |
| | | CTGAAGAACATCGACGAGATCGATCGGACC |
| | | CGGAAGTTCCTGCTGAGATGGTCCCTGAGG |
| | | CCTACCGAACCTGGCGAAGTGCGTAGACTG |
| | | GAACCCGGCCAGAGATTCGCCATCGACCAG |
| | | CTGAATCACCTGAACGCCCTGAAAGAAGAT |
| | | CGGCTGAAGAAGATGGCCAACACCATCATC |
| | | ATGCACGCCCTGGGCTACTGCTACGACGTG |
| | | CGGAAGAAGAAATGGCAGGCTAAGAACCCC |
| | | GCCTGCCAGATCATCCTGTTCGAGGATCTG |
| | | AGCAACTACAACCCCTACGAGGAAAGGTCC |
| | | CGCTTCGAGAACAGCAAGCTCATGAAGTGG |
| | | TCCAGACGCGAGATCCCCAGACA |
| | | GGTTGCACTGCAGGGCGAGATCTATGGCCT |
| | | GCAAGTGGGAGAAGTGGGCGCTCAGTTCAG |
| | | CAGCAGATTCCACGCCAAGACAGGCAGCCC |
| | | TGGCATCAGATGTAGCGTCGTGACCAAAGA |
| | | GAAGCTGCAGGACAATCGGTTCTTCAAGAA |
| | | TCTGCAGAGAGAGGGCAGACTGACCCTGGA |
| | | CAAAATCGCCGTGCTGAAAGAGGGCGATCT |
| | | GTACCCAGACAAAGGCGGCGAGAAGTTCAT |
| | | CAGCCTGAGCAAGGATCGGAAGTGCGTGAC |
| | | CACACACGCCGACATCAACGCCGCTCAGAA |
| | | CCTGCAGAAGCGGTTCTGGACAAGAACCCA |
| | | CGGCTTCTACAAGGTGTACTGCAAGGCCTA |
| | | CCAGGTGGACGGCCAGACCGTGTACATCCC |
| | | TGAGAGCAAGGACCAGAAGCAGAAGATCAT |
| | | CGAAGAGTTCGGCGAGGGCTACTTCATTCT |
| | | GAAGGACGGGGTGTACGAATGGGTCAACGC |
| | | CGGCAAGCTGAAAATCAAGAAGGGCAGCTC |
| | | CAAGCAGAGCAGCAGCGAGCTGGTGGATAG |
| | | CGACATCCTGAAAGACAGCTTCGACCTGGC |
| | | CTCCGAGCTGAAAGGCGAAAAGCTGATGCT |
| | | GTACAGGGACCCCAGCGGCAATGTGTTCCC |
| | | CAGCGACAAATGGATGGCCGCTGGCGTGTT |
| | | CTTCGGAAAGCTGGAACGCATCCTGATCAG |
| | | CAAGCTGACCAACCAGTACTCCATCAGCAC |
| | | CATCGAGGACGACAGCAGCAAGCAGTCTAT |
| | | GAAAAGGCCGGCGGCCACGAAAAAGGCCGG |
| | | CCAGGCAAAAAAGAAAAAGGGATCCTACCC |
| | | ATACGATGTTCCAGATTACGCTTATCCCTA |
| | | CGACGTGCCTGATTATGCATACCCATATGA |
| | | TGTCCCCGACTATGCCTAA |
| BhCas12b | 279 | MAPKKKRKVGIHGVPAAATRSFILKIEPNE |
| GGSGGS- | | EVKKGLWKTHEVLNHGIAYYMNILKLIRQE |
| ABE8- | | AIYEHHEQDPKNPKKVSKAEIQAELWDFVL |
| Xten20 | | KMQKCNSFTHEVDKDEVFNILRELYEELVP |
| at D306 | | SSVEKKGEANQLSNKFLYPLVDPNSQSGKG |
| polypeptide | | TASSGRKPRWYNLKIAGDPSWEEEKKKWEE |
| | | DKKKDPLAKILGKLAEYGLIPLFIPYTDSN |
| | | EPIVKEIKWMEKSRNQSVRRLDKDMFIQAL |
| | | ERFLSWESWNLKVKEEYEKVEKEYKTLEER |
| | | IKEDIQALKALEQYEKERQEQLLRDTLNTN |
| | | EYRLSKRGLRGWREIIQKWLKMDGGSGGSS |
| | | EVEFSHEYWMRHALTLAKRARDEREVPVGA |
| | | VLVLNNRVIGEGWNRAIGLHDPTAHAEIMA |
| | | LRQGGLVMQNYRLYDATLYVTFEPCVMCAG |
| | | AMIHSRIGRVVFGVRNAKTGAAGSLMDVLH |
| | | HPGMNHRVEITEGILADECAALLCRFFRMP |
| | | RRVFNAQKKAQSSTDGSSGSETPGTSESAT |
| | | PESSGENEPSEKYLEVFKDYQRKHPREAGD |
| | | YSVYEFLSKKENHFIWRNHPEYPYLYATFC |
| | | EIDKKKKDAKQQATFTLADPINHPLWVRFE |
| | | ERSGSNLNKYRILTEQLHTEKLKKKLTVQL |
| | | DRLIYPTESGGWEEKGKVDIVLLPSRQFYN |
| | | QIFLDIEEKGKHAFTYKDESIKFPLKGTLG |
| | | GARVQFDRDHLRRYPHKVESGNVGRIYFNM |
| | | TVNIEPTESPVSKSLKIHRDDFPKWNFKPK |
| | | ELTEWIKDSKGKKLKSGIESLEIGLRVMSI |
| | | DLGQRQAAAASIFEVVDQKPDIEGKLFFPI |
| | | KGTELYAVHRASFNIKLPGETLVKSREVLR |
| | | KAREDNLKLMNQKLNFLRNVLHFQQFEDIT |
| | | EREKRVTKWISRQENSDVPLVYQDELIQIR |
| | | ELMYKPYKDWVAFLKQLHKRLEVEIGKEVK |
| | | HWRKSLSDGRKGLYGISLKNIDEIDRTRKF |
| | | LLRWSLRPTEPGEVRRLEPGQRFAIDQLNH |
| | | LNALKEDRLKKMANTIIMHALGYCYDVRKK |
| | | KWQAKNPACQIILFEDLSNYNPYEERSRFE |
| | | NSKLMKWSRREIPRQVALQGEIYGLQVGEV |
| | | GAQFSSRFHAKTGSPGIRCSWTKEKLQDNR |
| | | FFKNLQREGRLTLDKIAVLKEGDLYPDKGG |
| | | EKFISLSKDRKCVTTHADINAAQNLQKRFW |
| | | TRTHGFYKVYCKAYQVDGQTVYIPESKDQK |
| | | QKIIEEFGEGYFILKDGVYEWVNAGKLKIK |
| | | KGSSKQSSSELVDSDILKDSFDLASELKGE |
| | | KLMLYRDPSGNVFPSDKWMAAGVFFGKLER |
| | | ILISKLTNQYSISTIEDDSSKQSMKRPAAT |
| | | KKAGQAKKKKGSYPYDVPDYAYPYDVPDYA |
| | | YPYDVPDYA |
| BhCas12b | 280 | GCCACCATGGCCCCAAAGAAGAAGCGGAAG |
| GGSGGS- | | GTCGGTATCCACGGAGTCCCAGCAGCCGCC |
| ABE8- | | ACCAGATCCTTCATCCTGAAGATCGAGCCC |
| Xten20 | | AACGAGGAAGTGAAGAAAGGCCTCTGGAAA |
| at D980 | | ACCCACGAGGTGCTGAACCACGGAATCGCC |
| poly- | | TACTACATGAATATCCTGAAGCTGATCCGG |
| nucleotide | | CAAGAGGCCATCTACGAGCACCACGAGCAG |
| | | GACCCCAAGAATCCCAAGAAGGTGTCCAAG |
| | | GCCGAGATCCAGGCCGAGCTGTGGGATTTC |
| | | GTGCTGAAGATGCAGAAGTGCAACAGCTTC |
| | | ACACACGAGGTGGACAAGGACGAGGTGTTC |
| | | AACATCCTGAGAGAGCTGTACGAGGAACTG |
| | | GTGCCCAGCAGCGTGGAAAAGAAGGGCGAA |
| | | GCCAACCAGCTGAGCAACAAGTTTCTGTAC |
| | | CCTCTGGTGGACCCCAACAGCCAGTCTGGA |
| | | AAGGGAACAGCCAGCAGCGGCAGAAAGCCC |
| | | AGATGGTACAACCTGAAGATTGCCGGCGAT |
| | | CCCTCCTGGGAAGAAGAGAAGAAGAAGTGG |
| | | GAAGAAGATAAGAAAAAGGACCCGCTGGCC |
| | | AAGATCCTGGGCAAGCTGGCTGAGTACGGA |
| | | CTGATCCCTCTGTTCATCCCCTACACCGAC |
| | | AGCAACGAGCCCATCGTGAAAGAAATCAAG |
| | | TGGATGGAAAAGTCCCGGAACCAGAGCGTG |
| | | CGGCGGCTGGATAAGGACATGTTCATTCAG |
| | | GCCCTGGAACGGTTCCTGAGCTGGGAGAGC |
| | | TGGAACCTGAAAGTGAAAGAGGAATACGAG |
| | | AAGGTCGAGAAAGAGTACAAGACCCTGGAA |
| | | GAGAGGATCAAAGAGGACATCCAGGCTCTG |
| | | AAGGCTCTGGAACAGTATGAGAAAGAGCGG |
| | | CAAGAACAGCTGCTGCGGGACACCCTGAAC |
| | | ACCAACGAGTACCGGCTGAGCAAGAGAGGC |
| | | CTTAGAGGCTGGCGGGAAATCATCCAGAAA |
| | | TGGCTGAAAATGGACGAGAACGAGCCCTCC |
| | | GAGAAGTACCTGGAAGTGTTCAAGGACTAC |
| | | CAGCGGAAGCACCCTAGAGAGGCCGGCGAT |
| | | TACAGCGTGTACGAGTTCCTGTCCAAGAAA |
| | | GAGAACCACTTCATCTGGCGGAATCACCCT |
| | | GAGTACCCCTACCTGTACGCCACCTTCTGC |
| | | GAGATCGACAAGAAAAAGAAGGACGCCAAG |
| | | CAGCAGGCCACCTTCACACTGGCCGATCCT |
| | | ATCAATCACCCTCTGTGGGTCCGATTCGAG |
| | | GAAAGAAGCGGCAGCAACCTGAACAAGTAC |
| | | AGAATCCTGACCGAGCAGCTGCACACCGAG |
| | | AAGCTGAAGAAAAAGCTGACAGTGCAGCTG |
| | | GACCGGCTGATCTACCCTACAGAATCTGGC |
| | | GGCTGGGAAGAGAAGGGCAAAGTGGACATT |
| | | GTGCTGCTGCCCAGCCGGCAGTTCTACAAC |
| | | CAGATCTTCCTGGACATCGAGGAAAAGGGC |
| | | AAGCACGCCTTCACCTACAAGGATGAGAGC |
| | | ATCAAGTTCCCTCTGAAGGGCACACTCGGC |
| | | GGAGCCAGAGTGCAGTTCGACAGAGATCAC |
| | | CTGAGAAGATACCCTCACAAGGTGGAAAGC |
| | | GGCAACGTGGGCAGAATCTACTTCAACATG |
| | | ACCGTGAACATCGAGCCTACAGAGTCCCCA |
| | | GTGTCCAAGTCTCTGAAGATCCACCGGGAC |
| | | GACTTCCCCAAGGTGGTCAACTTCAAGCCC |
| | | AAAGAACTGACCGAGTGGATCAAGGACAGC |
| | | AAGGGCAAGAAACTGAAGTCCGGCATCGAG |
| | | TCCCTGGAAATCGGCCTGAGAGTGATGAGC |
| | | ATCGACCTGGGACAGAGACAGGCCGCTGCC |
| | | GCCTCTATTTTCGAGGTGGTGGATCAGAAG |
| | | CCCGACATCGAAGGCAAGCTGTTTTTCCCA |
| | | ATCAAGGGCACCGAGCTGTATGCCGTGCAC |
| | | AGAGCCAGCTTCAACATCAAGCTGCCCGGC |
| | | GAGACACTGGTCAAGAGCAGAGAAGTGCTG |
| | | CGGAAGGCCAGAGAGGACAATCTGAAACTG |
| | | ATGAACCAGAAGCTCAACTTCCTGCGGAAC |
| | | GTGCTGCACTTCCAGCAGTTCGAGGACATC |
| | | ACCGAGAGAGAGAAGCGGGTCACCAAGTGG |
| | | ATCAGCAGACAAGAGAACAGCGACGTGCCC |
| | | CTGGTGTACCAGGATGAGCTGATCCAGATC |
| | | CGCGAGCTGATGTACAAGCCTTACAAGGAC |
| | | TGGGTCGCCTTCCTGAAGCAGCTCCACAAG |
| | | AGACTGGAAGTCGAGATCGGCAAAGAAGTG |
| | | AAGCACTGGCGGAAGTCCCTGAGCGACGGA |
| | | AGAAAGGGCCTGTACGGCATCTCCCTGAAG |
| | | AACATCGACGAGATCGATCGGACCCGGAAG |
| | | TTCCTGCTGAGATGGTCCCTGAGGCCTACC |
| | | GAACCTGGCGAAGTGCGTAGACTGGAACCC |
| | | GGCCAGAGATTCGCCATCGACCAGCTGAAT |
| | | CACCTGAACGCCCTGAAAGAAGATCGGCTG |
| | | AAGAAGATGGCCAACACCATCATCATGCAC |
| | | GCCCTGGGCTACTGCTACGACGTGCGGAAG |
| | | AAGAAATGGCAGGCTAAGAACCCCGCCTGC |
| | | CAGATCATCCTGTTCGAGGATCTGAGCAAC |
| | | TACAACCCCTACGAGGAAAGGTCCCGCTTC |
| | | GAGAACAGCAAGCTCATGAAGTGGTCCAGA |
| | | CGCGAGATCCCCAGACAGGTTGCACTGCAG |
| | | GGCGAGATCTATGGCCTGCAAGTGGGAGAA |
| | | GTGGGCGCTCAGTTCAGCAGCAGATTCCAC |
| | | GCCAAGACAGGCAGCCCTGGCATCAGATGT |
| | | AGCGTCGTGACCAAAGAGAAGCTGCAGGAC |
| | | AATCGGTTCTTCAAGAATCTGCAGAGAGAG |
| | | GGCAGACTGACCCTGGACAAAATCGCCGTG |
| | | CTGAAAGAGGGCGATCTGTACCCAGACAAA |
| | | GGCGGCGAGAAGTTCATCAGCCTGAGCAAG |
| | | GATCGGAAGTGCGTGAC |
| | | CACACACGCCGACATCAACGCCGCTCAGAA |
| | | CCTGCAGAAGCGGTTCTGGACAAGAACCCA |
| | | CGGCTTCTACAAGGTGTACTGCAAGGCCTA |
| | | CCAGGTGGACGGAGGCTCTGGAGGAAGCTC |
| | | CGAAGTCGAGTTTTCCCATGAGTACTGGAT |
| | | GAGACACGCATTGACTCTCGCAAAGAGGGC |
| | | TCGAGATGAACGCGAGGTGCCCGTGGGGGC |
| | | AGTACTCGTGCTCAACAATCGCGTAATCGG |
| | | CGAAGGTTGGAATAGGGCAATCGGACTCCA |
| | | CGACCCCACTGCACATGCGGAAATCATGGC |
| | | CCTTCGACAGGGAGGGCTTGTGATGCAGAA |
| | | TTATCGACTTTATGATGCGACGCTGTACGT |
| | | CACGTTTGAACCTTGCGTAATGTGCGCGGG |
| | | AGCTATGATTCACTCCCGCATTGGACGAGT |
| | | TGTATTCGGTGTTCGCAACGCCAAGACGGG |
| | | TGCCGCAGGTTCACTGATGGACGTGCTGCA |
| | | TCATCCAGGCATGAACCACCGGGTAGAAAT |
| | | CACAGAAGGCATATTGGCGGACGAATGTGC |
| | | GGCGCTGTTGTGTCGTTTTTTTCGCATGCC |
| | | CAGGCGGGTCTTTAACGCCCAGAAAAAAGC |
| | | ACAATCCTCTACTGACGGCTCTTCTGGATC |
| | | TGAAACACCTGGCACAAGCGAGAGCGCCAC |
| | | CCCTGAGAGCTCTGGCGGCCAGACCGTGTA |
| | | CATCCCTGAGAGCAAGGACCAGAAGCAGAA |
| | | GATCATCGAAGAGTTCGGCGAGGGCTACTT |
| | | CATTCTGAAGGACGGGGTGTACGAATGGGT |
| | | CAACGCCGGCAAGCTGAAAATCAAGAAGGG |
| | | CAGCTCCAAGCAGAGCAGCAGCGAGCTGGT |
| | | GGATAGCGACATCCTGAAAGACAGCTTCGA |
| | | CCTGGCCTCCGAGCTGAAAGGCGAAAAGCT |
| | | GATGCTGTACAGGGACCCCAGCGGCAATGT |
| | | GTTCCCCAGCGACAAATGGATGGCCGCTGG |
| | | CGTGTTCTTCGGAAAGCTGGAACGCATCCT |
| | | GATCAGCAAGCTGACCAACCAGTACTCCAT |
| | | CAGCACCATCGAGGACGACAGCAGCAAGCA |
| | | GTCTATGAAAAGGCCGGCGGCCACGAAAAA |
| | | GGCCGGCCAGGCAAAAAAGAAAAAGGGATC |
| | | CTACCCATACGATGTTCCAGATTACGCTTA |
| | | TCCCTACGACGTGCCTGATTATGCATACCC |
| | | ATATGATGTCCCCGACTATGCCTAA |
| BhCas12b | 281 | MAPKKKRKVGIHGVPAAATRSFILKIEPNE |
| GGSGGS- | | EVKKGLWKTHEVLNHGIAYYMNILKLIRQE |
| ABE8- | | AIYEHHEQDPKNPKKVSKAEIQAELWDFVL |
| Xten20 | | KMQKCNSFTHEVDKDEVFNILRELYEELVP |
| at D980 | | SSVEKKGEANQLSNKFLYPLVDPNSQSGKG |
| polypeptide | | TASSGRKPRWYNLKIAGDPSWEEEKKKWEE |
| | | DKKKDPLAKILGKLAEYGLIPLFIPYTDSN |
| | | EPIVKEIKWMEKSRNQSVRRLDKDMFIQAL |
| | | ERFLSWESWNLKVKEEYEKVEKEYKTLEER |
| | | IKEDIQALKALEQYEKERQEQLLRDTLNTN |
| | | EYRLSKRGLRGWREIIQKWLKMDENEPSEK |
| | | YLEVFKDYQRKHPREAGDYSVYEFLSKKEN |
| | | HFIWRNHPEYPYLYATFCEIDKKKKDAKQQ |
| | | ATFTLADPINHPLWVRFEERSGSNLNKYRI |
| | | LTEQLHTEKLKKKLTVQLDRLIYPTESGGW |
| | | EEKGKVDIVLLPSRQFYNQIFLDIEEKGKH |
| | | AFTYKDESIKFPLKGTLGGARVQFDRDHLR |
| | | RYPHKVESGNVGRIYFNMTVNIEPTESPVS |
| | | KSLKIHRDDFPKVVNFKPKELTEWIKDSKG |
| | | KKLKSGIESLEIGLRVMSIDLGQRQAAAAS |
| | | IFEWDQKPDIEGKLFFPIKGTELYAVHRAS |
| | | FNIKLPGETLVKSREVLRKAREDNLKLMNQ |
| | | KLNFLRNVLHFQQFEDITEREKRVTKWISR |
| | | QENSDVPLVYQDELIQIRELMYKPYKDWVA |
| | | FLKQLHKRLEVEIGKEVKHWRKSLSDGRKG |
| | | LYGISLKNIDEIDRTRKFLLRWSLRPTEPG |
| | | EVRRLEPGQRFAIDQLNHLNALKEDRLKKM |
| | | ANTIIMHALGYCYDVRKKKWQAKNPACQII |
| | | LFEDLSNYNPYEERSRFENSKLMKWSRREI |
| | | PRQVALQGEIYGLQVGEVGAQFSSRFHAKT |
| | | GSPGIRCSWTKEKLQDNRFFKNLQREGRLT |
| | | LDKIAVLKEGDLYPDKGGEKFISLSKDRKC |
| | | VTTHADINAAQNLQKRFWTRTHGFYKVYCK |
| | | AYQVDGGSGGSSEVEFSHEYWMRHALTLAK |
| | | RARDEREVPVGAVLVLNNRVIGEGWNRAIG |
| | | LHDPTAHAEIMALRQGGLVMQNYRLYDATL |
| | | YVTFEPCVMCAGAMIHSRIGRWFGVRNAKT |
| | | GAAGSLMDVLHHPGMNHRVEITEGILADEC |
| | | AALLCRFFRMPRRVFNAQKKAQSSTDGSSG |
| | | SETPGTSESATPESSGGQTVYIPESKDQKQ |
| | | KIIEEFGEGYFILKDGVYEWVNAGKLKIKK |
| | | GSSKQSSSELVDSDILKDSFDLASELKGEK |
| | | LMLYRDPSGNVFPSDKWMAAGVFFGKLERI |
| | | LISKLTNQYSISTIEDDSSKQSMKRPAATK |
| | | KAGQAKKKKGSYPYDVPDYAYPYDVPDYAY |
| | | PYDVPDYA |
| BhCas12b | 282 | GCCACCATGGCCCCAAAGAAGAAGCGGAAG |
| GGSGGS- | | GTCGGTATCCACGGAGTCCCAGCAGCCGCC |
| ABE8- | | ACCAGATCCTTCATCCTGAAGATCGAGCCC |
| Xten20 | | AACGAGGAAGTGAAGAAAGGCCTCTGGAAA |
| atK1019 | | ACCCACGAGGTGCTGAACCACGGAATCGCC |
| poly- | | TACTACATGAATATCCTGAAGCTGATCCGG |
| nucleotide | | CAAGAGGCCATCTACGAGCACCACGAGCAG |
| | | GACCCCAAGAATCCCAAGAAGGTGTCCAAG |
| | | GCCGAGATCCAGGCCGAGCTGTGGGATTTC |
| | | GTGCTGAAGATGCAGAAGTGCAACAGCTTC |
| | | ACACACGAGGTGGACAAGGACGAGGTGTTC |
| | | AACATCCTGAGAGAGCTGTACGAGGAACTG |
| | | GTGCCCAGCAGCGTGGAAAAGAAGGGCGAA |
| | | GCCAACCAGCTGAGCAACAAGTTTCTGTAC |
| | | CCTCTGGTGGACCCCAACAGCCAGTCTGGA |
| | | AAGGGAACAGCCAGCAGCGGCAGAAAGCCC |
| | | AGATGGTACAACCTGAAGATTGCCGGCGAT |
| | | CCCTCCTGGGAAGAAGAGAAGAAGAAGTGG |
| | | GAAGAAGATAAGAAAAAGGACCCGCTGGCC |
| | | AAGATCCTGGGCAAGCTGGCTGAGTACGGA |
| | | CTGATCCCTCTGTTCATCCCCTACACCGAC |
| | | AGCAACGAGCCCATCGTGAAAGAAATCAAG |
| | | TGGATGGAAAAGTCCCGGAACCAGAGCGTG |
| | | CGGCGGCTGGATAAGGACATGTTCATTCAG |
| | | GCCCTGGAACGGTTCCTGAGCTGGGAGAGC |
| | | TGGAACCTGAAAGTGAAAGAGGAATACGAG |
| | | AAGGTCGAGAAAGAGTACAAGACCCTGGAA |
| | | GAGAGGATCAAAGAGGACATCCAGGCTCTG |
| | | AAGGCTCTGGAACAGTATGAGAAAGAGCGG |
| | | CAAGAACAGCTGCTGCGGGACACCCTGAAC |
| | | ACCAACGAGTACCGGCTGAGCAAGAGAGGC |
| | | CTTAGAGGCTGGCGGGAAATCATCCAGAAA |
| | | TGGCTGAAAATGGACGAGAACGAGCCCTCC |
| | | GAGAAGTACCTGGAAGTGTTCAAGGACTAC |
| | | CAGCGGAAGCACCCTAGAGAGGCCGGCGAT |
| | | TACAGCGTGTACGAGTTCCTGTCCAAGAAA |
| | | GAGAACCACTTCATCTGGCGGAATCACCCT |
| | | GAGTACCCCTACCTGTACGCCACCTTCTGC |
| | | GAGATCGACAAGAAAAAGAAGGACGCCAAG |
| | | CAGCAGGCCACCTTCACACTGGCCGATCCT |
| | | ATCAATCACCCTCTGTGGGTCCGATTCGAG |
| | | GAAAGAAGCGGCAGCAACCTGAACAAGTAC |
| | | AGAATCCTGACCGAGCAGCTGCACACCGAG |
| | | AAGCTGAAGAAAAAGCTGACAGTGCAGCTG |
| | | GACCGGCTGATCTACCCTACAGAATCTGGC |
| | | GGCTGGGAAGAGAAGGGCAAAGTGGACATT |
| | | GTGCTGCTGCCCAGCCGGCAGTTCTACAAC |
| | | CAGATCTTCCTGGACATCGAGGAAAAGGGC |
| | | AAGCACGCCTTCACCTACAAGGATGAGAGC |
| | | ATCAAGTTCCCTCTGAAGGGCACACTCGGC |
| | | GGAGCCAGAGTGCAGTTCGACAGAGATCAC |
| | | CTGAGAAGATACCCTCACAAGGTGGAAAGC |
| | | GGCAACGTGGGCAGAATCTACTTCAACATG |
| | | ACCGTGAACATCGAGCCTACAGAGTCCCCA |
| | | GTGTCCAAGTCTCTGAAGATCCACCGGGAC |
| | | GACTTCCCCAAGGTGGTCAACTTCAAGCCC |
| | | AAAGAACTGACCGAGTGGATCAAGGACAGC |
| | | AAGGGCAAGAAACTGAAGTCCGGCATCGAG |
| | | TCCCTGGAAATCGGCCTGAGAGTGATGAGC |
| | | ATCGACCTGGGACAGAGACAGGCCGCTGCC |
| | | GCCTCTATTTTCGAGGTGGTGGATCAGAAG |
| | | CCCGACATCGAAGGCAAGCTGTTTTTCCCA |
| | | ATCAAGGGCACCGAGCTGTATGCCGTGCAC |
| | | AGAGCCAGCTTCAACATCAAGCTGCCCGGC |
| | | GAGACACTGGTCAAGAGCAGAGAAGTGCTG |
| | | CGGAAGGCCAGAGAGGACAATCTGAAACTG |
| | | ATGAACCAGAAGCTCAACTTCCTGCGGAAC |
| | | GTGCTGCACTTCCAGCAGTTCGAGGACATC |
| | | ACCGAGAGAGAGAAGCGGGTCACCAAGTGG |
| | | ATCAGCAGACAAGAGAACAGCGACGTGCCC |
| | | CTGGTGTACCAGGATGAGCTGATCCAGATC |
| | | CGCGAGCTGATGTACAAGCCTTACAAGGAC |
| | | TGGGTCGCCTTCCTGAAGCAGCTCCACAAG |
| | | AGACTGGAAGTCGAGATCGGCAAAGAAGTG |
| | | AAGCACTGGCGGAAGTCCCTGAGCGACGGA |
| | | AGAAAGGGCCTGTACGGCATCTCCCTGAAG |
| | | AACATCGACGAGATCGATCGGACCCGGAAG |
| | | TTCCTGCTGAGATGGTCCCTGAGGCCTACC |
| | | GAACCTGGCGAAGTGCGTAGACTGGAACCC |
| | | GGCCAGAGATTCGCCATCGACCAGCTGAAT |
| | | CACCTGAACGCCCTGAAAGAAGATCGGCTG |
| | | AAGAAGATGGCCAACACCATCATCATGCAC |
| | | GCCCTGGGCTACTGCTACGACGTGCGGAAG |
| | | AAGAAATGGCAGGCTAAGAACCCCGCCTGC |
| | | CAGATCATCCTGTTCGAGGATCTGAGCAAC |
| | | TAC |
| | | AACCCCTACGAGGAAAGGTCCCGCTTCGAG |
| | | AACAGCAAGCTCATGAAGTGGTCCAGACGC |
| | | GAGATCCCCAGACAGGTTGCACTGCAGGGC |
| | | GAGATCTATGGCCTGCAAGTGGGAGAAGTG |
| | | GGCGCTCAGTTCAGCAGCAGATTCCACGCC |
| | | AAGACAGGCAGCCCTGGCATCAGATGTAGC |
| | | GTCGTGACCAAAGAGAAGCTGCAGGACAAT |
| | | CGGTTCTTCAAGAATCTGCAGAGAGAGGGC |
| | | AGACTGACCCTGGACAAAATCGCCGTGCTG |
| | | AAAGAGGGCGATCTGTACCCAGACAAAGGC |
| | | GGCGAGAAGTTCATCAGCCTGAGCAAGGAT |
| | | CGGAAGTGCGTGACCACACACGCCGACATC |
| | | AACGCCGCTCAGAACCTGCAGAAGCGGTTC |
| | | TGGACAAGAACCCACGGCTTCTACAAGGTG |
| | | TACTGCAAGGCCTACCAGGTGGACGGCCAG |
| | | ACCGTGTACATCCCTGAGAGCAAGGACCAG |
| | | AAGCAGAAGATCATCGAAGAGTTCGGCGAG |
| | | GGCTACTTCATTCTGAAGGACGGGGTGTAC |
| | | GAATGGGTCAACGCCGGCAAGGGAGGCTCT |
| | | GGAGGAAGCTCCGAAGTCGAGTTTTCCCAT |
| | | GAGTACTGGATGAGACACGCATTGACTCTC |
| | | GCAAAGAGGGCTCGAGATGAACGCGAGGTG |
| | | CCCGTGGGGGCAGTACTCGTGCTCAACAAT |
| | | CGCGTAATCGGCGAAGGTTGGAATAGGGCA |
| | | ATCGGACTCCACGACCCCACTGCACATGCG |
| | | GAAATCATGGCCCTTCGACAGGGAGGGCTT |
| | | GTGATGCAGAATTATCGACTTTATGATGCG |
| | | ACGCTGTACGTCACGTTTGAACCTTGCGTA |
| | | ATGTGCGCGGGAGCTATGATTCACTCCCGC |
| | | ATTGGACGAGTTGTATTCGGTGTTCGCAAC |
| | | GCCAAGACGGGTGCCGCAGGTTCACTGATG |
| | | GACGTGCTGCATCATCCAGGCATGAACCAC |
| | | CGGGTAGAAATCACAGAAGGCATATTGGCG |
| | | GACGAATGTGCGGCGCTGTTGTGTCGTTTT |
| | | TTTCGCATGCCCAGGCGGGTCTTTAACGCC |
| | | CAGAAAAAAGCACAATCCTCTACTGACGGC |
| | | TCTTCTGGATCTGAAACACCTGGCACAAGC |
| | | GAGAGCGCCACCCCTGAGAGCTCTGGCCTG |
| | | AAAATCAAGAAGGGCAGCTCCAAGCAGAGC |
| | | AGCAGCGAGCTGGTGGATAGCGACATCCTG |
| | | AAAGACAGCTTCGACCTGGCCTCCGAGCTG |
| | | AAAGGCGAAAAGCTGATGCTGTACAGGGAC |
| | | CCCAGCGGCAATGTGTTCCCCAGCGACAAA |
| | | TGGATGGCCGCTGGCGTGTTCTTCGGAAAG |
| | | CTGGAACGCATCCTGATCAGCAAGCTGACC |
| | | AACCAGTACTCCATCAGCACCATCGAGGAC |
| | | GACAGCAGCAAGCAGTCTATGAAAAGGCCG |
| | | GCGGCCACGAAAAAGGCCGGCCAGGCAAAA |
| | | AAGAAAAAGGGATCCTACCCATACGATGTT |
| | | CCAGATTACGCTTATCCCTACGACGTGCCT |
| | | GATTATGCATACCCATATGATGTCCCCGAC |
| | | TATGCCTAA |
| BhCas12b | 283 | MAPKKKRKVGIHGVPAAATRSFILKIEPNE |
| GGSGGS- | | EVKKGLWKTHEVLNHGIAYYMNILKLIRQE |
| ABE8- | | AIYEHHEQDPKNPKKVSKAEIQAELWDFVL |
| Xten20 | | KMQKCNSFTHEVDKDEVFNILRELYEELVP |
| at K1019 | | SSVEKKGEANQLSNKFLYPLVDPNSQSGKG |
| polypeptide | | TASSGRKPRWYNLKIAGDPSWEEEKKKWEE |
| | | DKKKDPLAKILGKLAEYGLIPLFIPYTDSN |
| | | EPIVKEIKWMEKSRNQSVRRLDKDMFIQAL |
| | | ERFLSWESWNLKVKEEYEKVEKEYKTLEER |
| | | IKEDIQALKALEQYEKERQEQLLRDTLNTN |
| | | EYRLSKRGLRGWREIIQKWLKMDENEPSEK |
| | | YLEVFKDYQRKHPREAGDYSVYEFLSKKEN |
| | | HFIWRNHPEYPYLYATFCEIDKKKKDAKQQ |
| | | ATFTLADPINHPLWVRFEERSGSNLNKYRI |
| | | LTEQLHTEKLKKKLTVQLDRLIYPTESGGW |
| | | EEKGKVDIVLLPSRQFYNQIFLDIEEKGKH |
| | | AFTYKDESIKFPLKGTLGGARVQFDRDHLR |
| | | RYPHKVESGNVGRIYFNMTVNIEPTESPVS |
| | | KSLKIHRDDFPKVVNFKPKELTEWIKDSKG |
| | | KKLKSGIESLEIGLRVMSIDLGQRQAAAAS |
| | | IFEVVDQKPDIEGKLFFPIKGTELYAVHRA |
| | | SFNIKLPGETLVKSREVLRKAREDNLKLMN |
| | | QKLNFLRNVLHFQQFEDITEREKRVTKWIS |
| | | RQENSDVPLVYQDELIQIRELMYKPYKDWV |
| | | AFLKQLHKRLEVEIGKEVKHWRKSLSDGRK |
| | | GLYGISLKNIDEIDRTRKFLLRWSLRPTEP |
| | | GEVRRLEPGQRFAIDQLNHLNALKEDRLKK |
| | | MANTIIMHALGYCYDVRKKKWQAKNPACQI |
| | | ILFEDLSNYNPYEERSRFENSKLMKWSRRE |
| | | IPRQVALQGEIYGLQVGEVGAQFSSRFHAK |
| | | TGSPGIRCSWTKEKLQDNRFFKNLQREGRL |
| | | TLDKIAVLKEGDLYPDKGGEKFISLSKDRK |
| | | CVTTHADINAAQNLQKRFWTRTHGFYKVYC |
| | | KAYQVDGQTVYIPESKDQKQKIIEEFGEGY |
| | | FILKDGVYEWVNAGKGGSGGSSEVEFSHEY |
| | | WMRHALTLAKRARDE |
| | | REVPVGAVLVLNNRVTGEGWNRATGLHDPT |
| | | AHAETMALRQGGLVMQNYRLYDATLYVTFE |
| | | PCVMCAGAMTHSRTGRWFGVRNAKTGAAGS |
| | | LMDVLHHPGMNHRVETTEGTLADECAALLC |
| | | RFFRMPRRVFNAQKKAQSSTDGSSGSETPG |
| | | TSESATPESSGLKTKKGSSKQSSSELVDSD |
| | | TLKDSFDLASELKGEKLMLYRDPSGNVFPS |
| | | DKWMAAGVFFGKLERTLTSKLTNQYSTSTT |
| | | EDDSSKQSMKRPAATKKAGQAKKKKGSYPY |
| | | DVPDYAYPYDVPDYAYPYDVPDYA |
| tr\|A5H718\| | 41 | MTDAEYVRTHEKLDTYTFKKQFFNNKKSVS |
| A5H718 | | HRCYVLFELKRRGERRACFWGYAVNKPQSG |
| _PETMA | | TERGTHAETFSTRKVEEYLRDNPGQFTTNW |
| Cytosine | | YSSWSPCADCAEKTLEWYNQELRGNGHTLK |
| deaminase | | TWACKLYYEKNARNQTGLWNLRDNGVGLNV |
| OS = | | MVSEHYQCCRKTFTQSSHNQLNENRWLEKT |
| Petromyzon | | LKRAEKRRSELSTMTQVKTLHTTKSPAV |
| marinus | | |
| OX = 7757 | | |
| PE = 2 | | |
| SV = 1 | | |
| amino | | |
| acid | | |
| sequence; | | |
| PmCDA1 | | |
| amino | | |
| acid | | |
| sequence | | |
| EF094822.1 | 42 | TGACACGACACAGCCGTGTATATGAGGAAG |
| Petromyzon | | GGTAGCTGGATGGGGGGGGGGGGAATACGT |
| marinus | | TCAGAGAGGACATTAGCGAGCGTCTTGTTG |
| isolate | | GTGGCCTTGAGTCTAGACACCTGCAGACAT |
| PmCDA.21 | | GACCGACGCTGAGTACGTGAGAATCCATGA |
| cytosine | | GAAGTTGGACATCTACACGTTTAAGAAACA |
| deaminase | | GTTTTTCAACAACAAAAAATCCGTGTCGCA |
| mRNA, | | TAGATGCTACGTTCTCTTTGAATTAAAACG |
| complete cds; | | ACGGGGTGAACGTAGAGCGTGTTTTTGGGG |
| PmCDA1 | | CTATGCTGTGAATAAACCACAGAGCGGGAC |
| amino | | AGAACGTGGAATTCACGCCGAAATCTTTAG |
| acid | | CATTAGAAAAGTCGAAGAATACCTGCGCGA |
| sequence | | CAACCCCGGACAATTCACGATAAATTGGTA |
| | | CTCATCCTGGAGTCCTTGTGCAGATTGCGC |
| | | TGAAAAGATCTTAGAATGGTATAACCAGGA |
| | | GCTGCGGGGGAACGGCCACACTTTGAAAAT |
| | | CTGGGCTTGCAAACTCTATTACGAGAAAAA |
| | | TGCGAGGAATCAAATTGGGCTGTGGAACCT |
| | | CAGAGATAACGGGGTTGGGTTGAATGTAAT |
| | | GGTAAGTGAACACTACCAATGTTGCAGGAA |
| | | AATATTCATCCAATCGTCGCACAATCAATT |
| | | GAATGAGAATAGATGGCTTGAGAAGACTTT |
| | | GAAGCGAGCTGAAAAACGACGGAGCGAGTT |
| | | GTCCATTATGATTCAGGTAAAAATACTCCA |
| | | CACCACTAAGAGTCCTGCTGTTTAAGAGGC |
| | | TATGCGGATGGTTTTC |
| tr\|Q6QJ80\| | 43 | MDSLLMNRRKFLYQFKNVRWAKGRRETYLC |
| Q6QJ80_ | | YWKRRDSATSFSLDFGYLRNKNGCHVELLF |
| HUMAN | | LRYTSDWDLDPGRCYRVTWFTSWSPCYDCA |
| Activation- | | RHVADFLRGNPNLSLRTFTARLYFCEDRKA |
| induced | | EPEGLRRLHRAGVQTATMTFKAPV |
| cytidine | | |
| deaminase | | |
| OS = Homo | | |
| sapiens | | |
| OX = 9606 | | |
| GN = AICDA | | |
| PE = 2 | | |
| SV = 1; | | |
| AID amino | | |
| acid | | |
| sequence | | |
| NG_011588.1: | 44 | AGAGAACCATCATTAATTGAAGTGAGATTT |
| 5001 | | TTCTGGCCTGAGACTTGCAGGGAGGCAAGA |
| -15681 Homo | | AGACACTCTGGACACCACTATGGACAGGTA |
| sapiens | | AAGAGGCAGTCTTCTCGTGGGTGATTGCAC |
| activation | | TGGCCTTCCTCTCAGAGCAAATCTGAGTAA |
| induced | | TGAGACTGGTAGCTATCCCTTTCTCTCATG |
| cytidine | | TAACTGTCTGACTGATAAGATCAGCTTGAT |
| deaminase | | CAATATGCATATATATTTTTTGATCTGTCT |
| (AICDA), | | CCTTTTCTTCTATTCAGATCTTATACGCTG |
| RefSeqGene | | TCAGCCCAATTCTTTCTGTTTCAGACTTCT |
| (LRG_17) on | | CTTGATTTCCCTCTTTTTCATGTGGCAAAA |
| chromosome | | GAAGTAGTGCGTACAATGTACTGATTCGTC |
| 12; nucleic | | CTGAGATTTGTACCATGGTTGAAACTAATT |
| acid | | TATGGTAATAATATTAACATAGCAAATCTT |
| sequence | | TAGAGACTCAAATCATGAAAAGGTAATAGC |
| of the | | AGTACTGTACTAAAAACGGTAGTGCTAATT |
| CDS of | | TTCGTAATAATTTTGTAAATATTCAACAGT |
| human AID | | AAAACAACTTGAAGACACACTTTCCTAGGG |
| | | AGGCGTTACTGAAATAATTTAGCTATAGTA |
| | | AGAAAATTTGTAATTTTAGAAATGCCAAGC |
| | | ATTCTAAATTAATTGCTTGAAAGTCACTAT |
| | | GATTGTGTCCATTATAAGGAGACAAATTCA |
| | | TTCAAGCAAGTTATTTAATGTTAAAGGCCC |
| | | AATTGTTAGGCAGTTAATGGCACTTTTACT |
| | | ATTAACTAATCTTTCCATTTGTTCAGACGT |
| | | AGCTTAACTTACCTCTTAGGTGTGAATTTG |
| | | GTTAAGGTCCTCATAATGTCTTTATGTGCA |
| | | GTTTTTGATAGGTTATTGTCATAGAACTTA |
| | | TTCTATTCCTACATTTATGATTACTATGGA |
| | | TGTATGAGAATAACACCTAATCCTTATACT |
| | | TTACCTCAATTTAACTCCTTTATAAAGAAC |
| | | TTACATTACAGAATAAAGATTTTTTAAAAA |
| | | TATATTTTTTTGTAGAGACAGGGTCTTAGC |
| | | CCAGCCGAGGCTGGTCTCTAAGTCCTGGCC |
| | | CAAGCGATCCTCCTGCCTGGGCCTCCTAAA |
| | | GTGCTGGAATTATAGACATGAGCCATCACA |
| | | TCCAATATACAGAATAAAGATTTTTAATGG |
| | | AGGATTTAATGTTCTTCAGAAAATTTTCTT |
| | | GAGGTCAGACAATGTCAAATGTCTCCTCAG |
| | | TTTACACTGAGATTTTGAAAACAAGTCTGA |
| | | GCTATAGGTCCTTGTGAAGGGTCCATTGGA |
| | | AATACTTGTTCAAAGTAAAATGGAAAGCAA |
| | | AGGTAAAATCAGCAGTTGAAATTCAGAGAA |
| | | AGACAGAAAAGGAGAAAAGATGAAATTCAA |
| | | CAGGACAGAAGGGAAATATATTATCATTAA |
| | | GGAGGACAGTATCTGTAGAGCTCATTAGTG |
| | | ATGGCAAAATGACTTGGTCAGGATTATTTT |
| | | TAACCCGCTTGTTTCTGGTTTGCACGGCTG |
| | | GGGATGCAGCTAGGGTTCTGCCTCAGGGAG |
| | | CACAGCTGTCCAGAGCAGCTGTCAGCCTGC |
| | | AAGCCTGAAACACTCCCTCGGTAAAGTCCT |
| | | TCCTACTCAGGACAGAAATGACGAGAACAG |
| | | GGAGCTGGAAACAGGCCCCTAACCAGAGAA |
| | | GGGAAGTAATGGATCAACAAAGTTAACTAG |
| | | CAGGTCAGGATCACGCAATTCATTTCACTC |
| | | TGACTGGTAACATGTGACAGAAACAGTGTA |
| | | GGCTTATTGTATTTTCATGTAGAGTAGGAC |
| | | CCAAAAATCCACCCAAAGTCCTTTATCTAT |
| | | GCCACATCCTTCTTATCTATACTTCCAGGA |
| | | CACTTTTTCTTCCTTATGATAAGGCTCTCT |
| | | CTCTCTCCACACACACACACACACACACAC |
| | | ACACACACACACACACACACACAAACACAC |
| | | ACCCCGCCAACCAAGGTGCATGTAAAAAGA |
| | | TGTAGATTCCTCTGCCTTTCTCATCTACAC |
| | | AGCCCAGGAGGGTAAGTTAATATAAGAGGG |
| | | ATTTATTGGTAAGAGATGATGCTTAATCTG |
| | | TTTAACACTGGGCCTCAAAGAGAGAATTTC |
| | | TTTTCTTCTGTACTTATTAAGCACCTATTA |
| | | TGTGTTGAGCTTATATATACAAAGGGTTAT |
| | | TATATGCTAATATAGTAATAGTAATGGTGG |
| | | TTGGTACTATGGTAATTACCATAAAAATTA |
| | | TTATCCTTTTAAAATAAAGCTAATTATTAT |
| | | TGGATCTTTTTTAGTATTCATTTTATGTTT |
| | | TTTATGTTTTTGATTTTTTAAAAGACAATC |
| | | TCACCCTGTTACCCAGGCTGGAGTGCAGTG |
| | | GTGCAATCATAGCTTTCTGCAGTCTTGAAC |
| | | TCCTGGGCTCAAGCAATCCTCCTGCCTTGG |
| | | CCTCCCAAAGTGTTGGGATACAGTCATGAG |
| | | CCACTGCATCTGGCCTAGGATCCATTTAGA |
| | | TTAAAATATGCATTTTAAATTTTAAAATAA |
| | | TATGGCTAATTTTTACCTTATGTAATGTGT |
| | | ATACTGGCAATAAATCTAGTTTGCTGCCTA |
| | | AAGTTTAAAGTGCTTTCCAGTAAGCTTCAT |
| | | GTACGTGAGGGGAGACATTTAAAGTGAAAC |
| | | AGACAGCCAGGTGTGGTGGCTCACGCCTGT |
| | | AATCCCAGCACTCTGGGAGGCTGAGGTGGG |
| | | TGGATCGCTTGAGCCCTGGAGTTCAAGACC |
| | | AGCCTGAGCAACATGGCAAAACGCTGTTTC |
| | | TATAACAAAAATTAGCCGGGCATGGTGGCA |
| | | TGTGCCTGTGGTCCCAGCTACTAGGGGGCT |
| | | GAGGCAGGAGAATCGTTGGAGCCCAGGAGG |
| | | TCAAGGCTGCACTGAGCAGTGCTTGCGCCA |
| | | CTGCACTCCAGCCTGGGTGACAGGACCAGA |
| | | CCTTGCCTCAAAAAAATAAGAAGAAAAATT |
| | | AAAAATAAATGGAAACAACTACAAAGAGCT |
| | | GTTGTCCTAGATGAGCTACTTAGTTAGGCT |
| | | GATATTTTGGTATTTAACTTTTAAAGTCAG |
| | | GGTCTGTCACCTGCACTACATTATTAAAAT |
| | | ATCAATTCTCAATGTATATCCACACAAAGA |
| | | CTGGTACGTGAATGTTCATAGTACCTTTAT |
| | | TCACAAAACCCCAAAGTAGAGACTATCCAA |
| | | ATATCCATCAACAAGTGAACAAATAAACAA |
| | | AATGTGCTATATCCATGCAATGGAATACCA |
| | | CCCTGCAGTACAAAGAAGCTACTTGGGGAT |
| | | GAATCCCAAAGTCATGACGCTAAATGAAAG |
| | | AGTCAGACATGAAGGAGGAGATAATGTATG |
| | | CCATACGAAATTCTAGAAAATGAAAGTAAC |
| | | TTATAGTTACAGAAAGCAAATCAGGGCAGG |
| | | CATAGAGGCTCACACCTGTAATCCCAGCAC |
| | | TTTGAGAGGCCACGTGGGAAGATTGCTAGA |
| | | ACTCAGGAGTTCAAGACCAGCCTGGGCAAC |
| | | ACAGTGAAACTCCATTCTCCACAAAAATGG |
| | | GAAAAAAAGAAAGCAAATCAGTGGTTGTCC |
| | | TGTGGGGAGGGGAAGGACTGCAAAGAGGGA |
| | | AGAAGCTCTGGTGGGGTGAGGGTGGTGATT |
| | | CAGGTTCTGTATCCTGACTGTGGTAGCAGT |
| | | TTGGGGTGTTTACATCCAAAAATATTCGTA |
| | | GAATTATGCATCTTAAATGGGTGGAGTTTA |
| | | CTGTATGTAAATTATACCTCAATGTAAGAA |
| | | AAAATAATGTGTAAGAAAACTTTCAATTCT |
| | | CTTGCCAGCAAACGTTATTCAAATTCCTGA |
| | | GCCCTTTACTTCGCAAATTCTCTGCACTTC |
| | | TGCCCCGTACCATTAGGTGACAGCACTAGC |
| | | TCCACAAATTGGATAAATGCATTTCTGGAA |
| | | AAGACTAGGGACAAAATCCAGGCATCACTT |
| | | GTGCTTTCATATCAACCATGCTGTACAGCT |
| | | TGTGTTGCTGTCTGCAGCTGCAATGGGGAC |
| | | TCTTGATTTCTTTAAGGAAACTTGGGTTAC |
| | | CAGAGTATTTCCACAAATGCTATTCAAATT |
| | | AGTGCTTATGATATGCAAGACACTGTGCTA |
| | | GGAGCCAGAAAACAAAGAGGAGGAGAAATC |
| | | AGTCATTATGTGGGAACAACATAGCAAGAT |
| | | ATTTAGATCATTTTGACTAGTTAAAAAAGC |
| | | AGCAGAGTACAAAATCACACATGCAATCAG |
| | | TATAATCCAAATCATGTAAATATGTGCCTG |
| | | TAGAAAGACTAGAGGAATAAACACAAGAAT |
| | | CTTAACAGTCATTGTCATTAGACACTAAGT |
| | | CTAATTATTATTATTAGACACTATGATATT |
| | | TGAGATTTAAAAAATCTTTAATATTTTAAA |
| | | ATTTAGAGCTCTTCTATTTTTCCATAGTAT |
| | | TCAAGTTTGACAATGATCAAGTATTACTCT |
| | | TTCTTTTTTTTTTTTTTTTTTTTTTTTTGA |
| | | GATGGAGTTTTGGTCTTGTTGCCCATGCTG |
| | | GAGTGGAATGGCATGACCATAGCTCACTGC |
| | | AACCTCCACCTCCTGGGTTCAAGCAAAGCT |
| | | GTCGCCTCAGCCTCCCGGGTAGATGGGATT |
| | | ACAGGCGCCCACCACCACACTCGGCTAATG |
| | | TTTGTATTTTTAGTAGAGATGGGGTTTCAC |
| | | CATGTTGGCCAGGCTGGTCTCAAACTCCTG |
| | | ACCTCAGAGGATCCACCTGCCTCAGCCTCC |
| | | CAAAGTGCTGGGATTACAGATGTAGGCCAC |
| | | TGCGCCCGGCCAAGTATTGCTCTTATACAT |
| | | TAAAAAACAGGTGTGAGCCACTGCGCCCAG |
| | | CCAGGTATTGCTCTTATACATTAAAAAATA |
| | | GGCCGGTGCAGTGGCTCACGCCTGTAATCC |
| | | CAGCACTTTGGGAAGCCAAGGCGGGCAGAA |
| | | CACCCGAGGTCAGGAGTCCAAGGCCAGCCT |
| | | GGCCAAGATGGTGAAACCCCGTCTCTATTA |
| | | AAAATACAAACATTACCTGGGCATGATGGT |
| | | GGGCGCCTGTAATCCCAGCTACTCAGGAGG |
| | | CTGAGGCAGGAGGATCCGCGGAGCCTGGCA |
| | | GATCTGCCTGAGCCTGGGAGGTTGAGGCTA |
| | | CAGTAAGCCAAGATCATGCCAGTATACTTC |
| | | AGCCTGGGCGACAAAGTGAGACCGTAACAA |
| | | AAAAAAAAAAATTTAAAAAAAGAAATTTAG |
| | | ATCAAGATCCAACTGTAAAAAGTGGCCTAA |
| | | ACACCACATTAAAGAGTTTGGAGTTTATTC |
| | | TGCAGGCAGAAGAGAACCATCAGGGGGTCT |
| | | TCAGCATGGGAATGGCATGGTGCACCTGGT |
| | | TTTTGTGAGATCATGGTGGTGACAGTGTGG |
| | | GGAATGTTATTTTGGAGGGACTGGAGGCAG |
| | | ACAGACCGGTTAAAAGGCCAGCACAACAGA |
| | | TAAGGAGGAAGAAGATGAGGGCTTGGACCG |
| | | AAGCAGAGAAGAGCAAACAGGGAAGGTACA |
| | | AATTCAAGAAATATTGGGGGGTTTGAATCA |
| | | ACACATTTAGATGATTAATTAAATATGAGG |
| | | ACTGAGGAATAAGAAATGAGTCAAGGATGG |
| | | TTCCAGGCTGCTAGGCTGCTTACCTGAGGT |
| | | GGCAAAGTCGGGAGGAGTGGCAGTTTAGGA |
| | | CAGGGGGCAGTTGAGGAATATTGTTTTGAT |
| | | CATTTTGAGTTTGAGGTACAAGTTGGACAC |
| | | TTAGGTAAAGACTGGAGGGGAAATCTGAAT |
| | | ATACAATTATGGGACTGAGGAACAAGTTTA |
| | | TTTTATTTTTTGTTTCGTTTTCTTGTTGAA |
| | | GAACAAATTTAATTGTAATCCCAAGTCATC |
| | | AGCATCTAGAAGACAGTGGCAGGAGGTGAC |
| | | TGTCTTGTGGGTAAGGGTTTGGGGTCCTTG |
| | | ATGAGTATCTCTCAATTGGCCTTAAATATA |
| | | AGCAGGAAAAGGAGTTTATGATGGATTCCA |
| | | GGCTCAGCAGGGCTCAGGAGGGCTCAGGCA |
| | | GCCAGCAGAGGAAGTCAGAGCATCTTCTTT |
| | | GGTTTAGCCCAAGTAATGACTTCCTTAAAA |
| | | AGCTGAAGGAAAATCCAGAGTGACCAGATT |
| | | ATAAACTGTACTCTTGCATTTTCTCTCCCT |
| | | CCTCTCACCCACAGCCTCTTGATGAACCGG |
| | | AGGAAGTTTCTTTACCAATTCAAAAATGTC |
| | | CGCTGGGCTAAGGGTCGGCGTGAGACCTAC |
| | | CTGTGCTACGTAGTGAAGAGGCGTGACAGT |
| | | GCTACATCCTTTTCACTGGACTTTGGTTAT |
| | | CTTCGCAATAAGGTATCAATTAAAGTCGGC |
| | | TTTGCAAGCAGTTTAATGGTCAACTGTGAG |
| | | TGCTTTTAGAGCCACCTGCTGATGGTATTA |
| | | CTTCCATCCTTTTTTGGCATTTGTGTCTCT |
| | | ATCACATTCCTCAAATCCTTTTTTTTATTT |
| | | CTTTTTCCATGTCCATGCACCCATATTAGA |
| | | CATGGCCCAAAATATGTGATTTAATTCCTC |
| | | CCCAGTAATGCTGGGCACCCTAATACCACT |
| | | CCTTCCTTCAGTGCCAAGAACAACTGCTCC |
| | | CAAACTGTTTACCAGCTTTCCTCAGCATCT |
| | | GAATTGCCTTTGAGATTAATTAAGCTAAAA |
| | | GCATTTTTATATGGGAGAATATTATCAGCT |
| | | TGTCCAAGCAAAAATTTTAAATGTGAAAAA |
| | | CAAATTGTGTCTTAAGCATTTTTGAAAATT |
| | | AAGGAAGAAGAATTTGGGAAAAAATTAACG |
| | | GTGGCTCAATTCTGTCTTCCAAATGATTTC |
| | | TTTTCCCTCCTACTCACATGGGTCGTAGGC |
| | | CAGTGAATACATTCAACATGGTGATCCCCA |
| | | GAAAACTCAGAGAAGCCTCGGCTGATGATT |
| | | AATTAAATTGATCTTTCGGCTACCCGAGAG |
| | | AATTACATTTCCAAGAGACTTCTTCACCAA |
| | | AATCCAGATGGGTTTACATAAACTTCTGCC |
| | | CACGGGTATCTCCTCTCTCCTAACACGCTG |
| | | TGACGTCTGGGCTTGGTGGAATCTCAGGGA |
| | | AGCATCCGTGGGGTGGAAGGTCATCGTCTG |
| | | GCTCGTTGTTTGATGGTTATATTACCATGC |
| | | AATTTTCTTTGCCTACATTTGTATTGAATA |
| | | CATCCCAATCTCCTTCCTATTCGGTGACAT |
| | | GACACATTCTATTTCAGAAGGCTTTGATTT |
| | | TATCAAGCACTTTCATTTACTTCTCATGGC |
| | | AGTGCCTATTACTTCTCTTACAATACCCAT |
| | | CTGTCTGCTTTACCAAAATCTATTTCCCCT |
| | | TTTCAGATCCTCCCAAATGGTCCTCATAAA |
| | | CTGTCCTGCCTCCACCTAGTGGTCCAGGTA |
| | | TATTTCCACAATGTTACATCAACAGGCACT |
| | | TCTAGCCATTTTCCTTCTCAAAAGGTGCAA |
| | | AAAGCAACTTCATAAACACAAATTAAATCT |
| | | TCGGTGAGGTAGTGTGATGCTGCTTCCTCC |
| | | CAACTCAGCGCACTTCGTCTTCCTCATTCC |
| | | ACAAAAACCCATAGCCTTCCTTCACTCTGC |
| | | AGGACTAGTGCTGCCAAGGGTTCAGCTCTA |
| | | CCTACTGGTGTGCTCTTTTGAGCAAGTTGC |
| | | TTAGCCTCTCTGTAACACAAGGACAATAGC |
| | | TGCAAGCATCCCCAAAGATCATTGCAGGAG |
| | | ACAATGACTAAGGCTACCAGAGCCGCAATA |
| | | AAAGTCAGTGAATTTTAGCGTGGTCCTCTC |
| | | TGTCTCTCCAGAACGGCTGCCACGTGGAAT |
| | | TGCTCTTCCTCCGCTACATCTCGGACTGGG |
| | | ACCTAGACCCTGGCCGCTGCTACCGCGTCA |
| | | CCTGGTTCACCTCCTGGAGCCCCTGCTACG |
| | | ACTGTGCCCGACATGTGGCCGACTTTCTGC |
| | | GAGGGAACCCCAACCTCAGTCTGAGGATCT |
| | | TCACCGCGCGCCTCTACTTCTGTGAGGACC |
| | | GCAAGGCTGAGCCCGAGGGGCTGCGGCGGC |
| | | TGCACCGCGCCGGGGTGCAAATAGCCATCA |
| | | TGACCTTCAAAGGTGCGAAAGGGCCTTCCG |
| | | CGCAGGCGCAGTGCAGCAGCCCGCATTCGG |
| | | GATTGCGATGCGGAATGAATGAGTTAGTGG |
| | | GGAAGCTCGAGGGGAAGAAGTGGGCGGGGA |
| | | TTCTGGTTCACCTCTGGAGCCGAAATTAAA |
| | | GATTAGAAGCAGAGAAAAGAGTGAATGGCT |
| | | CAGAGACAAGGCCCCGAGGAAATGAGAAAA |
| | | TGGGGCCAGGGTTGCTTCTTTCCCCTCGAT |
| | | TTGGAACCTGAACTGTCTTCTACCCCCATA |
| | | TCCCCGCCTTTTTTTCCTTTTTTTTTTTTT |
| | | GAAGATTATTTTTACTGCTGGAATACTTTT |
| | | GTAGAAAACCACGAAAGAACTTTCAAAGCC |
| | | TGGGAAGGGCTGCATGAAAATTCAGTTCGT |
| | | CTCTCCAGACAGCTTCGGCGCATCCTTTTG |
| | | GTAAGGGGCTTCCTCGCTTTTTAAATTTTC |
| | | TTTCTTTCTCTACAGTCTTTTTTGGAGTTT |
| | | CGTATATTTCTTATATTTTCTTATTGTTCA |
| | | ATCACTCTCAGTTTTCATCTGATGAAAACT |
| | | TTATTTCTCCTCCACATCAGCTTTTTCTTC |
| | | TGCTGTTTCACCATTCAGAGCCCTCTGCTA |
| | | AGGTTCCTTTTCCCTCCCTTTTCTTTCTTT |
| | | TGTTGTTTCACATCTTTAAATTTCTGTCTC |
| | | TCCCCAGGGTTGCGTTTCCTTCCTGGTCAG |
| | | AATTCTTTTCTCCTTTTTTTTTTTTTTTTT |
| | | TTTTTTTTTTAAACAAACAAACAAAAAACC |
| | | CAAAAAAACTCTTTCCCAATTTACTTTCTT |
| | | CCAACATGTTACAAAGCCATCCACTCAGTT |
| | | TAGAAGACTCTCCGGCCCCACCGACCCCCA |
| | | ACCTCGTTTTGAAGCCATTCACTCAATTTG |
| | | CTTCTCTCTTTCTCTACAGCCCCTGTATGA |
| | | GGTTGATGACTTACGAGACGCATTTCGTAC |
| | | TTTGGGACTTTGATAGCAACTTCCAGGAAT |
| | | GTCACACACGATGAAATATCTCTGCTGAAG |
| | | ACAGTGGATAAAAAACAGTCCTTCAAGTCT |
| | | TCTCTGTTTTTATTCTTCAACTCTCACTTT |
| | | CTTAGAGTTTACAGAAAAAATATTTATATA |
| | | CGACTCTTTAAAAAGATCTATGTCTTGAAA |
| | | ATAGAGAAGGAACACAGGTCTGGCCAGGGA |
| | | CGTGCTGCAATTGGTGCAGTTTTGAATGCA |
| | | ACATTGTCCCCTACTGGGAATAACAGAACT |
| | | GCAGGACCTGGGAGCATCCTAAAGTGTCAA |
| | | CGTFTTTCTATGACTTTTAGGTAGGATGAG |
| | | AGCAGAAGGTAGATCCTAAAAAGCATGGTG |
| | | AGAGGATCAAATGTTTTTATATCAACATCC |
| | | TTTATTATTTGATTCATTTGAGTTAACAGT |
| | | GGTGTTAGTGATAGATTTTTCTATTCTTTT |
| | | CCCTTGACGTTTACTTTCAAGTAACACAAA |
| | | CTCTTCCATCAGGCCATGATCTATAGGACC |
| | | TCCTAATGAGAGTATCTGGGTGATTGTGAC |
| | | CCCAAACCATCTCTCCAAAGCATTAATATC |
| | | CAATCATGCGCTGTATGTTTTAATCAGCAG |
| | | AAGCATGTTTTTATGTTTGTACAAAAGAAG |
| | | ATTGTTATGGGTGGGGATGGAGGTATAGAC |
| | | CATGCATGGTCACCTTCAAGCTACTTTAAT |
| | | AAAGGATCTTAAAATGGGCAGGAGGACTGT |
| | | GAACAAGACACCCTAATAATGGGTTGATGT |
| | | CTGAAGTAGCAAATCTTCTGGAAACGCAAA |
| | | CTCTTTTAAGGAAGTCCCTAATTTAGAAAC |
| | | ACCCACAAACTTCACATATCATAATTAGCA |
| | | AACAATTGGAAGGAAGTTGCTTGAATGTTG |
| | | GGGAGAGGAAAATCTATTGGCTCTCGTGGG |
| | | TCTCTTCATCTCAGAAATGCCAATCAGGTC |
| | | AAGGTTTGCTACATTTTGTATGTGTGTGAT |
| | | GCTTCTCCCAAAGGTATATTAACTATATAA |
| | | GAGAGTTGTGACAAAACAGAATGATAAAGC |
| | | TGCGAACCGTGGCACACGCTCATAGTTCTA |
| | | GCTGCTTGGGAGGTTGAGGAGGGAGGATGG |
| | | CTTGAACACAGGTGTTCAAGGCCAGCCTGG |
| | | GCAACATAACAAGATCCTGTCTCTCAAAAA |
| | | AAAAAAAAAAAAAAAGAAAGAGAGAGGGCC |
| | | GGGCGTGGTGGCTCACGCCTGTAATCCCAG |
| | | CACTTTGGGAGGCCGAGCCGGGCGGATCAC |
| | | CTGTGGTCAGGAGTTTGAGACCAGCCTGGC |
| | | CAACATGGCAAAACCCCGTCTGTACTCAAA |
| | | ATGCAAAAATTAGCCAGGCGTGGTAGCAGG |
| | | CACCTGTAATCCCAGCTACTTGGGAGGCTG |
| | | AGGCAGGAGAATCGCTTGAACCCAGGAGGT |
| | | GGAGGTTGCAGTAAGCTGAGATCGTGCCGT |
| | | TGCACTCCAGCCTGGGCGACAAGAGCAAGA |
| | | CTCTGTCTCAGAAAAAAAAAAAAAAAAGAG |
| | | AGAGAGAGAGAAAGAGAACAATATTTGGGA |
| | | GAGAAGGATGGGGAAGCATTGCAAGGAAAT |
| | | TGTGCTTTATCCAACAAAATGTAAGGAGCC |
| | | AATAAGGGATCCCTATTTGTCTCTTTTGGT |
| | | GTCTATTTGTCCCTAACAACTGTCTTTGAC |
| | | AGTGAGAAAAATATTCAGAATAACCATATC |
| | | CCTGTGCCGTTATTACCTAGCAACCCTTGC |
| | | AATGAAGATGAGCAGATCCACAGGAAAACT |
| | | TGAATGCACAACTGTCTTATTTTAATCTTA |
| | | TTGTACATAAGTTTGTAAAAGAGTTAAAAA |
| | | TTGTTACTTCATGTATTCATTTATATTTTA |
| | | TATTATTTTGCGTCTAATGATTTTTTATTA |
| | | ACATGATTTCCTTTTCTGATATATTGAAAT |
| | | GGAGTCTCAAAGCTTCATAAATTTATAACT |
| | | TTAGAAATGATTCTAATAACAACGTATGTA |
| | | ATTGTAACATTGCAGTAATGGTGCTACGAA |
| | | GCCATTTCTCTTGATTTTTAGTAAACTTTT |
| | | ATGACAGCAAATTTGCTTCTGGCTCACTTT |
| | | CAATCAGTTAAATAAATGATAAATAATTTT |
| | | GGAAGCTGTGAAGATAAAATACCAAATAAA |
| | | ATAATATAAAAGTGATTTATATGAAGTTAA |
| | | AATAAAAAATCAGTATGATGGAATAAACTT |
| | | G |
| Canine | 1374 | MDSLLMKQRKFLYHFKNVRWAKGRHETYLC |
| AID | | YVVKRRDSATSFSLDFGHLRNKSGCHVELL |
| (clAID) | | FLRYISDWDLDPGRCYRVTWFTSWSPCYDC |
| polypeptide | | ARHVADFLRGYPNLSLRIFAARLYFCEDRK |
| sequence | | AEPEGLRRLHRAGVQIAIMTFKDYFYCWNT |
| | | FVENREKTFKAWEGLHENSVRLSRQLRRIL |
| | | LPLYEVDDLRDAFRTLGL |
| Bovine | 1375 | MDSLLKKQRQFLYQFKNVRWAKGRHETYLC |
| AID | | YVVKRRDSPTSFSLDFGHLRNKAGCHVELL |
| (btAID) | | FLRYISDWDLDPGRCYRVTWFTSWSPCYDC |
| polypeptide | | ARHVADFLRGYPNLSLRIFTARLYFCDKER |
| sequence | | KAEPEGLRRLHRAGVQIAIMTFKDYFYCWN |
| | | TFVENHERTFKAWEGLHENSVRLSRQLRRI |
| | | LLPLYEVDDLRDAFRTLGL |
| Rat AID | 1376 | MAVGSKPKAALVGPHWERERIWCFLCSTGL |
| polypeptide | | GTQQTGQTSRWLRPAATQDPVSPPRSLLMK |
| sequence | | QRKFLYHFKNVRWAKGRHETYLCYVVKRRD |
| | | SATSFSLDFGYLRNKSGCHVELLFLRYISD |
| | | WDLDPGRCYRVTWFTSWSPCYDCARHVADF |
| | | LRGNPNLSLRIFTARLTGWGALPAGLMSPA |
| | | RPSDYFYCWNTFVENHERTFKAWEGLHENS |
| | | VRLSRRLRRILLPLYEVDDLRDAFRTLGL |
| Mouse | 1377 | MDSLLMNRRKFLYQFKNVRWAKGRRETYLC |
| (mAID) AID | | YVVKRRDSATSFSLDFGYLRNKNGCHVELL |
| polypeptide | | FLRYISDWDLDPGRCYRVTWFTSWSPCYDC |
| sequence | | ARHVADFLRGNPNLSLRIFTARLYFCEDRK |
| | | AEPEGLRRLHRAGVQIAIMTFKDYFYCWNT |
| | | FVENHERTFKAWEGLHENSVRLSRQLRRIL |
| | | LPLYEVDDLRDAFRTLGL |
| rAPOBEC-1 | 1378 | MSSETGPVAVDPTLRRRIEPHEFEVFFDPR |
| polypeptide | | ELRKETCLLYEINWGGRHSIWRHTSQNTNK |
| sequence | | HVEVNFIEKFTTERYFCPNTRCSITWFLSW |
| | | SPCGECSRAITEFLSRYPHVTLFIYIARLY |
| | | HHADPRNRQGLRDLISSGVTIQIMTEQESG |
| | | YCWRNFVNYSPSNEAHWPRYPHLWVRLYVL |
| | | ELYCIILGLPPCLNILRRKQPQLTFFTIAL |
| | | QSCHYQRLPPHILWATGLK |
| maAPOBEC-1 | 1379 | MSSETGPVVVDPTLRRRIEPHEFDAFFDQG |
| polypeptide | | ELRKETCLLYEIRWGGRHNIWRHTGQNTSR |
| sequence | | HVEINFIEKFTSERYFYPSTRCSIVWFLSW |
| | | SPCGECSKAITEFLSGHPNVTLFIYAARLY |
| | | HHTDQRNRQGLRDLISRGVTIRIMTEQEYC |
| | | YCWRNFVNYPPSNEVYWPRYPNLWMRLYAL |
| | | ELYCIHLGLPPCLKIKRRHQYPLTFFRLNL |
| | | QSCHYQRIPPHILWATGFI |
| ppAPOBEC-1 | 1380 | MTSEKGPSTGDPTLRRRIESWEFDVFYDPR |
| polypeptide | | ELRKETCLLYEIKWGMSRKIWRSSGKNTTN |
| sequence | | HVEVNFIKKFTSERRFHSSISCSITWFLSW |
| | | SPCWECSQAIREFLSQHPGVTLVIYVARLF |
| | | WHMDQRNRQGLRDLVNSGVTIQIMRASEYY |
| | | HCWRNFVNYPPGDEAHWPQYPPLWMMLYAL |
| | | ELHCIILSLPPCLKISRRWQNHLAFFRLHL |
| | | QNCHYQTIPPHILLATGLIHPSVTWR |
| ocAPOBECI | 1381 | MASEKGPSNKDYTLRRRIEPWEFEVFFDPQ |
| polypeptide | | ELRKEACLLYEIKWGASSKTWRSSGKNTTN |
| sequence | | HVEVNFLEKLTSEGRLGPSTCCSITWFLSW |
| | | SPCWECSMAIREFLSQHPGVTLIIFVARLF |
| | | QHMDRRNRQGLKDLVTSGVTVRVMSVSEYC |
| | | YCWENFVNYPPGKAAQWPRYPPRWMLMYAL |
| | | ELYCIILGLPPCLKISRRHQKQLTFFSLTP |
| | | QYCHYKMIPPYILLATGLLQPSVPWR |
| mdAPOBEC-1 | 1382 | MNSKTGPSVGDATLRRRIKPWEFVAFFNPQ |
| polypeptide | | ELRKETCLLYEIKWGNQNIWRHSNQNTSQH |
| sequence | | AEINFMEKFTAERHFNSSVRCSITWFLSWS |
| | | PCWECSKAIRKFLDHYPNVTLAIFISRLYW |
| | | HMDQQHRQGLKELVHSGVTIQIMSYSEYHY |
| | | CWRNFVDYPQGEEDYWPKYPYLWIMLYVLE |
| | | LHCIILGLPPCLKISGSHSNQLALFSLDLQ |
| | | DCHYQKIPYNVLVATGLVQPFVTWR |
| ppAPOBEC-2 | 1383 | MAQKEEAAAATEAASQNGEDLENLDDPEKL |
| polypeptide | | KELIELPPFEIVTGERLPANFFKFQFRNVE |
| sequence | | YSSGRNKTFLCYVVEAQGKGGQVQASRGYL |
| | | EDEHAAAHAEEAFFNTILPAFDPALRYNVT |
| | | WYVSSSPCAACADRIIKTLSKTKNLRLLIL |
| | | VGRLFMWEELEIQDALKKLKEAGCKLRIMK |
| | | PQDFEYVWQNFVEQEEGESKAFQPWEDIQE |
| | | NFLYYEEKLADILK |
| btAPOBEC-2 | 1384 | MAQKEEAAAAAEPASQNGEEVENLEDPEKL |
| polypeptide | | KELIELPPFEIVTGERLPAHYFKFQFRNVE |
| sequence | | YSSGRNKTFLCYVVEAQSKGGQVQASRGYL |
| | | EDEHATNHAEEAFFNSIMPTFDPALRYMVT |
| | | WYVSSSPCAACADRIVKTLNKTKNLRLLIL |
| | | VGRLFMWEEPEIQAALRKLKEAGCRLRIMK |
| | | PQDFEYIWQNFVEQEEGESKAFEPWEDIQE |
| | | NFLYYEEKLADILK |
| mAPOBEC- | 1385 | MQPQRLGPRAGMGPFCLGCSHRKCYSPIRN |
| 3-(1) | | LISQETFKFHFKNLGYAKGRKDTFLCYEVT |
| polypeptide | | RKDCDSPVSLHHGVFKNKDNIHAEICFLYW |
| sequence | | FHDKVLKVLSPREEFKITWYMSWSPCFECA |
| | | EQIVRFLATHHNLSLDIFSSRLYNVQDPET |
| | | QQNLCRLVQEGAQVAAMDLYEFKKCWKKFV |
| | | DNGGRRFRPWKRLLTNFRYQDSKLQEILRP |
| | | CYISVPSSSSSTLSNICLTKGLPETRFWVE |
| | | GRRMDPLSEEEFYSQFYNQRVKHLCYYHRM |
| | | KPYLCYQLEQFNGQAPLKGCLLSEKGKQHA |
| | | EILFLDKIRSMELSQVTITCYLTWSPCPNC |
| | | AWQLAAFKRDRPDLILHIYTSRLYFHWKRP |
| | | FQKGLCSLWQSGILVDVMDLPQFTDCWTNF |
| | | VNPKRPFWPWKGLEIISRRTQRRLRRIKES |
| | | WGLQDLVNDFGNLQLGPPMS |
| APOBEC- | 1386 | MGPFCLGCSHRKCYSPIRNLISQETFKFHF |
| 3-(2) | | KNLGYAKGRKDTFLCYEVTRKDCDSPVSLH |
| (Mouse | | HGVFKNKDNIHAEICFLYWFHDKVLKVLSP |
| APOBEC-3) | | REEFKITWYMSWSPCFECAEQIVRFLATHH |
| polypeptide | | NLSLDIFSSRLYNVQDPETQQNLCRLVQEG |
| sequence | | AQVAAMDLYEFKKCWKKFVDNGGRRFRPWK |
| | | RLLTNFRYQDSKLQEILRPCYIPVPSSSSS |
| | | TLSNICLTKGLPETRFCVEGRRMDPLSEEE |
| | | FYSQFYNQRVKHLCYYHRMKPYLCYQLEQF |
| | | NGQAPLKGCLLSEKGKQHAEILFLDKIRSM |
| | | ELSQVTITCYLTWSPCPNCAWQLAAFKRDR |
| | | PDLILHIYTSRLYFHWKRPFQKGLCSLWQS |
| | | GILVDVMDLPQFTDCWTNFVNPKRPFWPWK |
| | | GLEIISRRTQRRLRRIKESWGLQDLVNDFG |
| | | NLQLGPPMS |
| APOBEC-3 | 1387 | MGPFCLGCSHRKCYSPIRNLISQETFKFHF |
| polypeptide | | KNRLRYAIDRKDTFLCYEVTRKDCDSPVSL |
| sequence | | HHGVFKNKDNIHAEICFLYWFHDKVLKVLS |
| | | PREEFKITWYMSWSPCFECAEQVLRFLATH |
| | | HNLSLDIFSSRLYNIRDPENQQNLCRLVQE |
| | | GAQVAAMDLYEFKKCWKKFVDNGGRRFRPW |
| | | KKLLTNFRYQDSKLQEILRPCYIPVPSSSS |
| | | STLSNICLTKGLPETRFCVERRRVHLLSEE |
| | | EFYSQFYNQRVKHLCYYHGVKPYLCYQLEQ |
| | | FNGQAPLKGCLLSEKGKQHAEILFLDKIRS |
| | | MELSQVIITCYLTWSPCPNCAWQLAAFKRD |
| | | RPDLILHIYTSRLYFHWKRPFQKGLCSLWQ |
| | | SGILVDVMDLPQFTDCWTNFVNPKRPFWPW |
| | | KGLEIISRRTQRRLHRIKESWGLQDLVNDF |
| | | GNLQLGPPMS |
| hAPOBEC-3A | 1388 | MEASPASGPRHLMDPHIFTSNFNNGIGRHK |
| polypeptide | | TYLCYEVERLDNGTSVKMDQHRGFLHNQAK |
| sequence | | NLLCGFYGRHAELRFLDLVPSLQLDPAQIY |
| | | RVTWFISWSPCFSWGCAGEVRAFLQENTHV |
| | | RLRIFAARIYDYDPLYKEALQMLRDAGAQV |
| | | SIMTYDEFKHCWDTFVDHQGCPFQPWDGLD |
| | | EHSQALSGRLRAILQNQGN |
| hAPOBEC-3F | 1389 | MKPHFRNTVERMYRDTFSYNFYNRPILSRR |
| polypeptide | | NTVWLCYEVKTKGPSRPRLDAKIFRGQVYS |
| sequence | | QPEHHAEMCFLSWFCGNQLPAYKCFQITWF |
| | | VSWTPCPDCVAKLAEFLAEHPNVTLTISAA |
| | | RLYYYWERDYRRALCRLSQAGARVKIMDDE |
| | | EFAYCWENFVYSEGQPFMPWYKFDDNYAFL |
| | | HRTLKEILRNPMEAMYPHIFYFHFKNLRKA |
| | | YGRNESWLCFTMEWKHHSPVSWKRGVFRNQ |
| | | VDPETHCHAERCFLSWFCDDILSPNTNYEV |
| | | TWYTSWSPCPECAGEVAEFLARHSNVNLTI |
| | | FTARLYYFWDTDYQEGLRSLSQEGASVEIM |
| | | GYKDFKYCWENFVYNDDEPFKPWKGLKYNF |
| | | LFLDSKLQEILE |
| Rhesus | 1390 | MVEPMDPRTFVSNFNNRPILSGLNTVWLCC |
| macaque | | EVKTKDPSGPPLDAKIFQGKVYSKAKYHPE |
| APOBEC-3G | | MRFLRWFHKWRQLHHDQEYKVTWYVSWSPC |
| polypeptide | | TRCANSVATFLAKDPKVTLTIFVARLYYFW |
| sequence | | KPDYQQALRILCQKRGGPHATMKIMNYNEF |
| | | QDCWNKFVDGRGKPFKPRNNLPKHYTLLQA |
| | | TLGELLRHLMDPGTFTSNFNNKPWVSGQHE |
| | | TYLCYKVERLHNDTWVPLNQHRGFLRNQAP |
| | | NIHGFPKGRHAELCFLDLIPFWKLDGQQYR |
| | | VTCFTSWSPCFSCAQEMAKFISNNEHVSLC |
| | | IFAARIYDDQGRYQEGLRALHRDGAKIAMM |
| | | NYSEFEYCWDTFVDRQGRPFQPWDGLDEHS |
| | | QALSGRLRAI |
| Chimpanzee | 1391 | MKPHFRNPVERMYQDTFSDNFYNRPILSHR |
| APOBEC-3G | | NTVWLCYEVKTKGPSRPPLDAKIFRGQVYS |
| polypeptide | | KLKYHPEMRFFHWFSKWRKLHRDQEYEVTW |
| sequence | | YISWSPCTKCTRDVATFLAEDPKVTLTIFV |
| | | ARLYYFWDPDYQEALRSLCQKRDGPRATMK |
| | | IMNYDEFQHCWSKFVYSQRELFEPWNNLPK |
| | | YYILLHIMLGEILRHSMDPPTFTSNFNNEL |
| | | WVRGRHETYLCYEVERLHNDTWVLLNQRRG |
| | | FLCNQAPHKHGFLEGRHAELCFLDVIPFWK |
| | | LDLHQDYRVTCFTSWSPCFSCAQEMAKFIS |
| | | NNKHVSLCIFAARIYDDQGRCQEGLRTLAK |
| | | AGAKISIMTYSEFKHCWDTFVDHQGCPFQP |
| | | WDGLEEHSQALSGRLRAILQNQGN |
| Green | 1392 | MNPQIRNMVEQMEPDIFVYYFNNRPILSGR |
| monkey | | NTVWLCYEVKTKDPSGPPLDANIFQGKLYP |
| APOBEC-3G | | EAKDHPEMKFLHWFRKWRQLHRDQEYEVTW |
| polypeptide | | YVSWSPCTRCANSVATFLAEDPKVTLTIFV |
| sequence | | ARLYYFWKPDYQQALRILCQERGGPHATMK |
| | | IMNYNEFQHCWNEFVDGQGKPFKPRKNLPK |
| | | HYTLLHATLGELLRHVMDPGTFTSNFNNKP |
| | | WVSGQRETYLCYKVERSHNDTWVLLNQHRG |
| | | FLRNQAPDRHGFPKGRHAELCFLDLIPFWK |
| | | LDDQQYRVTCFTSWSPCFSCAQKMAKFISN |
| | | NKHVSLCIFAARIYDDQGRCQEGLRTLHRD |
| | | GAKIAVMNYSEFEYCWDTFVDRQGRPFQPW |
| | | DGLDEHSQALSGRLRAI |
| Human | 1393 | MKPHFRNTVERMYRDTFSYNFYNRPILSRR |
| APOBEC-3G | | NTVWLCYEVKTKGPSRPPLDAKIFRGQVYS |
| polypeptide | | ELKYHPEMRFFHWFSKWRKLHRDQEYEVTW |
| sequence | | YISWSPCTKCTRDMATFLAEDPKVTLTIFV |
| | | ARLYYFWDPDYQEALRSLCQKRDGPRATMK |
| | | IMNYDEFQHCWSKFVYSQRELFEPWNNLPK |
| | | YYILLHIMLGEILRHSMDPPTFTFNFNNEP |
| | | WVRGRHETYLCYEVERMHNDTVWLLNQRRG |
| | | FLCNQAPHKHGFLEGRHAELCFLDVIPFWK |
| | | LDLDQDYRVTCFTSWSPCFSCAQEMAKFIS |
| | | KNKHVSLCIFTARIYDDQGRCQEGLRTLAE |
| | | AGAKISIMTYSEFKHCWDTFVDHQGCPFQP |
| | | WDGLDEHSQDLSGRLRAILQNQEN |
| Human | 1394 | MNPQIRNPMERMYRDTFYDNFENEPILYGR |
| APOBEC-3B | | SYTWLCYEVKIKRGRSNLLWDTGVFRGQVY |
| polypeptide | | FKPQYHAEMCFLSWFCGNQLPAYKCFQITW |
| sequence | | FVSWTPCPDCVAKLAEFLSEHPNVTLTISA |
| | | ARLYYYWERDYRRALCRLSQAGARVTIMDY |
| | | EEFAYCWENFVYNEGQQFMPWYKFDENYAF |
| | | LHRTLKEILRYLMDPDTFTFNFNNDPLVLR |
| | | RRQTYLCYEVERLDNGTVWLMDQHMGFLCN |
| | | EAKNLLCGFYGRHAELRFLDLVPSLQLDPA |
| | | QIYRVTWFISWSPCFSWGCAGEVRAFLQEN |
| | | THVRLRIFAARIYDYDPLYKEALQMLRDAG |
| | | AQVSIMTYDEFEYCWDTFVYRQGCPFQPWD |
| | | GLEEHSQALSGRLRAILQNQGN |
| Rat | 1395 | MQPQGLGPNAGMGPVCLGCSHRRPYSPIRN |
| APOBEC-3B | | PLKKLYQQTFYFHFKNVRYAWGRKNNFLCY |
| polypeptide | | EVNGMDCALPVPLRQGVFRKQGHIHAELCF |
| sequence | | IYWFHDKVLRVLSPMEEFKVTWYMSWSPCS |
| | | KCAEQVARFLAAHRNLSLAIFSSRLYYYLR |
| | | NPNYQQKLCRLIQEGVHVAAMDLPEFKKCW |
| | | NKFVDNDGQPFRPWMRLRINFSFYDCKLQE |
| | | IFSRMNLLREDVFYLQFNNSHRVKPVQNRY |
| | | YRRKSYLCYQLERANGQEPLKGYLLYKKGE |
| | | QHVEILFLEKMRSMELSQVRITCYLTWSPC |
| | | PNCARQLAAFKKDHPDLILRIYTSRLYFWR |
| | | KKFQKGLCTLWRSGIHVDVMDLPQFADCWT |
| | | NFVNPQRPFRPWNELEKNSWRIQRRLRRIK |
| | | ESWGL |
| Bovine | 1396 | DGWEVAFRSGTVLKAGVLGVSMTEGWAGSG |
| APOBEC- | | HPGQGACVWTPGTRNTMNLLREVLFKQQFG |
| 3B | | NQPRVPAPYYRRKTYLCYQLKQRNDLTLDR |
| polypeptide | | GCFRNKKQRHAERFIDKINSLDLNPSQSYK |
| sequence | | IICYITWSPCPNCANELVNFITRNNHLKLE |
| | | IFASRLYFHWIKSFKMGLQDLQNAGISVAV |
| | | MTHTEFEDCWEQFVDNQSRPFQPWDKLEQY |
| | | SASIRRRLQRILTAPI |
| Chimpanzee | 1397 | MNPQIRNPMEWMYQRTFYYNFENEPILYGR |
| APOBEC-3B | | SYTWLCYEVKIRRGHSNLLWDTGVFRGQMY |
| polypeptide | | SQPEHHAEMCFLSWFCGNQLSAYKCFQITW |
| sequence | | FVSWTPCPDCVAKLAKFLAEHPNVTLTIS |
| | | AARLYYYWERDYRRAL |
| | | CRLSQAGARVKIMDDEEFAYCWENFVYNEG |
| | | QPFMPWYKFDDNYAFLHRTLKEIIRHLMDP |
| | | DTFTFNFNNDPLVLRRHQTYLCYEVERLDN |
| | | GTVWLMDQHMGFLCNEAKNLLCGFYGRHAE |
| | | LRFLDLVPSLQLDPAQIYRVTWFISWSPCF |
| | | SWGCAGQVRAFLQENTHVRLRIFAARIYDY |
| | | DPLYKEALQMLRDAGAQVSIMTYDEFEYCW |
| | | DTFVYRQGCPFQPWDGLEEHSQALSGRLRA |
| | | ILQVRASSLCMVPHRPPPPPQSPGPCLPLC |
| | | SEPPLGSLLPTGRPAPSLPFLLTASFSFPP |
| | | PASLPPLPSLSLSPGHLPVPSFHSLTSCSI |
| | | QPPCSSRIRETEGWASVSKEGRDLG |
| Human | 1398 | MNPQIRNPMKAMYPGTFYFQFKNLWEANDR |
| APOBEC- | | NETWLCFTVEGIKRRSVVSWKTGVFRNQVD |
| 3C | | SETHCHAERCFLSWFCDDILSPNTKYQVTW |
| polypeptide | | YTSWSPCPDCAGEVAEFLARHSNVNLTIFT |
| sequence | | ARLYYFQYPCYQEGLRSLSQEGVAVEIMDY |
| | | EDFKYCWENFVYNDNEPFKPWKGLKTNFRL |
| | | LKRRLRESLQ |
| Gorilla | 1399 | MNPQIRNPMKAMYPGTFYFQFKNLWEANDR |
| APOBEC- | | NETWLCFTVEGIKRRSVVSWKTGVFRNQVD |
| 3C | | SETHCHAERCFLSWECDDILSPNTNYQVTW |
| polypeptide | | YTSWSPCPECAGEVAEFLARHSNVNLTIFT |
| sequence | | ARLYYFQDTDYQEGLRSLSQEGVAVKIMDY |
| | | KDFKYCWENFVYNDDEPFKPWKGLKYNFRF |
| | | LKRRLQEILE |
| Rhesus | 1400 | MDGSPASRPRHLMDPNTFTFNFNNDLSVRG |
| macaque | | RHQTYLCYEVERLDNGTWVPMDERRGFLCN |
| APOBEC-3A | | KAKNVPCGDYGCHVELRFLCEVPSWQLDPA |
| polypeptide | | QTYRVTWFISWSPCFRRGCAGQVRVFLQEN |
| sequence | | KHVRLRIFAARIYDY |
| | | DPLYQEALRTLRDAGAQVSIMTYEEFKHCW |
| | | DTFVDRQGRPFQPWDGLDEHSQALSGRLRA |
| | | ILQNQGN |
| Bovine | 1401 | MDEYTFTENFNNQGWPSKTYLCYEMERLDG |
| APOBEC- | | DATIPLDEYKGFVRNKGLDQPEKPCHAELY |
| 3A | | FLGKIHSWNLDRNQHYRLTCFISWSPCYDC |
| polypeptide | | AQKLTTFLKENHHISLHILASRIYTHNRFG |
| sequence | | CHQSGLCELQAAGARITIMTFEDFKHCWET |
| | | FVDHKGKPFQPWEGLNVKSQALCTELQAIL |
| | | KTQQN |
| Human | 1402 | MALLTAETFRLQFNNKRRLRRPYYPRKALL |
| APOBEC- | | CYQLTPQNGSTPTRGYFENKKKCHAEICFI |
| 3H | | NEIKSMGLDETQCYQVTCYLTWSPCSSCAW |
| polypeptide | | ELVDFIKAHDHLNLGIFASRLYYHWCKPQQ |
| sequence | | KGLRLLCGSQVPVEVMGFPKFADCWENFVD |
| | | HEKPLSFNPYKMLEELDKNSRAIKRRLERI |
| | | KIPGVRAQGRYMDILCDAEV |
| Rhesus | 1403 | MALLTAKTFSLQFNNKRRVNKPYYPRKALL |
| macaque | | CYQLTPQNGSTPTRGHLKNKKKDHAEIRFI |
| APOBEC-3H | | NKIKSMGLDETQCYQVTCYLTWSPCPSCAG |
| polypeptide | | ELVDFIKAHRHLNLRIFASRLYYHWRPNYQ |
| sequence | | EGLLLLCGSQVPVEVMGLPEFTDCWENFVD |
| | | HKEPPSFNPSEKLEELDKNSQAIKRRLERI |
| | | KSRSVDVLENGLRSLQLGPVTPSSSIRNSR |
| Human | 1404 | MNPQIRNPMERMYRDTFYDNFENEPILYGR |
| APOBEC- | | SYTWLCYEVKIKRGRSNLLWDTGVFRGPVL |
| 3D | | PKRQSNHRQEVYFRFENHAEMCFLSWFCGN |
| polypeptide | | RLPANRRFQITWFVSWNPCLPCWKVTKFLA |
| sequence | | EHPNVTLTISAARLYYYRDRDWRWVLLRLH |
| | | KAGARVKIMDYEDFAYCWENFVCNEGQPFM |
| | | PWYKFDDNYASLHRTLKEILRNPMEAMYPH |
| | | IFYFHFKNLLKACGRNESWLCFTMEVTKHH |
| | | SAVFRKRGVFRNQVDPETHCHAERCFLSWF |
| | | CDDILSPNTNYEVTWYTSWSPCPECAGEVA |
| | | EFLARHSNVNLTIFTARLCYFWDTDYQEGL |
| | | CSLSQEGASVKIMGYKDFVSCWKNFVYSDD |
| | | EPFKPWKGLQTNFRLLKRRLREILQ |
| Human | 1405 | MTSEKGPSTGDPTLRRRIEPWEFDVFYDPR |
| APOBEC-1 | | ELRKEACLLYEIKWGMSRKIWRSSGKNTTN |
| polypeptide | | HVEVNFIKKFTSERDFHPSMSCSITWFLSW |
| sequence | | SPCWECSQAIREFLSRHPGVTLVIYVARLF |
| | | WHMDQQNRQGLRDLVNSGVTIQIMRASEYY |
| | | HCWRNFVNYPPGDEAHWPQYPPLWMMLYAL |
| | | ELHCIILSLPPCLKISRRWQNHLTFFRLHL |
| | | QNCHYQTIPPHILLATGLIHPSVAWR |
| Mouse | 1406 | MSSETGPVAVDPTLRRRIEPHEFEVFFDPR |
| APOBEC-1 | | ELRKETCLLYEINWGGRHSVWRHTSQNTSN |
| polypeptide | | HVEVNFLEKFTTERYFRPNTRCSITWFLSW |
| sequence | | SPCGECSRAITEFLSRHPYVTLFIYIARLY |
| | | HHTDQRNRQGLRDLISSGVTIQIMTEQEYC |
| | | YCWRNFVNYPPSNEAYWPRYPHLWVKLYVL |
| | | ELYCIILGLPPCLKILRRKQPQLTFFTITL |
| | | QTCHYQRIPPHLLWATGLK |
| Human | 1407 | MAQKEEAAVATEAASQNGEDLENLDDPEKL |
| APOBEC-2 | | KELIELPPFEIVTGERLPANFFKFQFRNVE |
| polypeptide | | YSSGRNKTFLCYVVEAQGKGGQVQASRGYL |
| sequence | | EDEHAAAHAEEAFFNTILPAFDPALRYNVT |
| | | WYVSSSPCAACADRIIKTLSKTKNLRLLIL |
| | | VGRLFMWEEPEIQAALKKLKEAGCKLRIMK |
| | | PQDFEYVWQNFVEQEEGESKAFQPWEDIQE |
| | | NFLYYEEKLADILK |
| Mouse | 1408 | MAQKEEAAEAAAPASQNGDDLENLEDPEKL |
| APOBEC-2 | | KELIDLPPFEIVTGVRLPVNFFKFQFRNVE |
| polypeptide | | YSSGRNKTFLCYWEVQSKGGQAQATQGYLE |
| sequence | | DEHAGAHAEEAFFNTILPAFDPALKYNVTW |
| | | YVSSSPCAACADRILKTLSKTKNLRLLILV |
| | | SRLFMWEEPEVQAALKKLKEAGCKLRIMKP |
| | | QDFEYIWQNFVEQEEGESKAFEPWEDIQEN |
| | | FLYYEEKLADILK |
| Rat | 1409 | MAQKEEAAEAAAPASQNGDDLENLEDPEKL |
| APOBEC-2 | | KELIDLPPFEIVTGVRLPVNFFKFQFRNVE |
| polypeptide | | YSSGRNKTFLCYWEAQSKGGQVQATQGYLE |
| sequence | | DEHAGAHAEEAFFNTILPAFDPALKYNVTW |
| | | YVSSSPCAACADRILKTLSKTKNLRLLILV |
| | | SRLFMWEEPEVQAALKKLKEAGCKLRIMKP |
| | | QDFEYLWQNFVEQEEGESKAFEPWEDIQEN |
| | | FLYYEEKLADILK |
| Petromyzon | 1410 | MTDAEYVRIHEKLDIYTFKKQFFNNKKSVS |
| marinus | | HRCYVLFELKRRGERRACFWGYAVNKPQSG |
| CDA1 | | TERGIHAEIFSIRKVEEYLRDNPGQFTINW |
| (pmCDAI) | | YSSWSPCADCAEKILEWYNQELRGNGHTLK |
| polypeptide | | IWACKLYYEKNARNQIGLWNLRDNGVGLNV |
| sequence | | MVSEHYQCCRKIFIQSSHNQLNENRWLEKT |
| | | LKRAEKRRSELSFMIQVKILHTTKSPAV |
| Human | 1411 | MKPHFRNTVERMYRDTFSYNFYNRPILSRR |
| APOBEC3G | | NTVWLCYEVKTKGPSRPPLDAKIFRGQVYS |
| D316R | | ELKYHPEMRFFHWFSKWRKLHRDQEYEVT |
| D317R | | WYISWSPCTKCTRDMATFLAEDPKVTLTIF |
| polypeptide | | VARLYYFWDPDYQEALRSLCQKRDGPRATM |
| sequence | | KFNYDEFQHCWSKFVYSQRELFEPWNNLPK |
| | | YYILLHFMLGEILRHSMDPPTFTFNFNNEP |
| | | WVRGRHETYLCYEVERMHNDTWVLLNQRRG |
| | | FLCNQAPHKHGFLEGRHAELCFLDVIPFWK |
| | | LDLDQDYRVTCFTSWSPCFSCAQEMAKFIS |
| | | KKHVSLCIFTARIYRRQGRCQEGLRTLAEA |
| | | GAKISFTYSEFKHCWDTFVDHQGCPFQPWD |
| | | GLDEHSQDLSGRLRAILQNQEN |
| Human | 1412 | MDPPTFTFNFNNEPWWGRHETYLCYEVERM |
| APOBEC3G | | HNDTWVLLNQRRGFLCNQAPHKHGFLEGRH |
| chain | | AELCFLDVIPFWKLDLDQDYRVTCFTSWSP |
| A polypeptide | | CFSCAQEMAKFISKNKHVSLCIFTARIYDD |
| sequence | | QGRCQEGLRTLAEAGAKISFTYSEFKHCWD |
| | | TFVDHQGCPFQPWDGLDEHSQDLSGRLRAI |
| | | LQ |
| Human | 1414 | MDPPTFTFNFNNEPWVRGRHETYLCYEVER |
| APOBEC3G | | MHNDTWVLLNQRRGFLCNQAPHKHGFLEGR |
| chain | | HAELCFLDVIPFWKLDLDQDYRVTCFTSWS |
| A D120R | | PCFSCAQEMAKFISKNKHVSLCIFTARIYR |
| D121R | | RQGRCQEGLRTLAEAGAKISFMTYSEFKHC |
| polypeptide | | WDTFVDHQGCPFQPWDGLDEHSQDLSGRLR |
| sequence | | AILQ |
| hAPOBEC-4 | 1415 | MEPIYEEYLANHGTIVKPYYWLSFSLDCSN |
| polypeptide | | CPYHIRTGEEARVSLTEFCQIFGFPYGTTF |
| sequence | | PQTKHLTFYELKTSSGSLVQKGHASSCTGN |
| | | YIHPESMLFEMNGYLDSAIYNNDSIRHIIL |
| | | YSNNSPCNEANHCCISKMYNFLITYPGITL |
| | | SIYFSQLYHTEMDFPASAWNREALRSLASL |
| | | WPRVVLSPISGGIWHSVLHSFISGVSGSHV |
| | | FQPILTGRALADRHNAYEINAITGVKPYFT |
| | | DVLLQTKRNPNTKAQEALESYPLNNAFPGQ |
| | | FFQMPSGQLQPNLPPDLRAPVVFVLVPLRD |
| | | LPPMHMGQNPNKPRNIVRHLNMPQMSFQET |
| | | KDLGRLPTGRSVEIVEITEQFASSKEADEK |
| | | KKKKGKK |
| rAPOBEC-4 | 1416 | MEPLYEEYLTHSGTIVKPYYWLSVSLNCTN |
| polypeptide | | CPYHIRTGEEARVPYTEFHQTFGFPWSTYP |
| sequence | | QTKHLTFYELRSSSGNLIQKGLASNCTGSH |
| | | THPESMLFERDGYLDSLIFHDSNIRHIILY |
| | | SNNSPCDEANHCCISKMYNFLMNYPEVTLS |
| | | VFFSQLYHTENQFPTSAWNREALRGLASLW |
| | | PQVTLSAISGGIWQSILETFVSGISEGLTA |
| | | VRPFTAGRTLTDRYNAYEINCITEVKPYFT |
| | | DALHSWQKENQDQKVWAASENQPLHNTTPA |
| | | QWQPDMSQDCRTPAVFMLVPYRDLPPIHVN |
| | | PSPQKPRTVVRHLNTLQLSASKVKALRKSP |
| | | SGRPVKKEEARKGSTRSQEANETNKSKWKK |
| | | QTLFIKSNICHLLEREQKKIGILSSWSV |
| rAPOBEC-1 | 1421 | MSSETGPVAVDPTLRRRIEPHEFEVFFDPR |
| (delta | | ELRKETCLLYEINWGGRHSIWRHTSQNTNK |
| 177-186) | | HVEVNFIEKFTTERYFCPNTRCSITWFLSW |
| polypeptide | | SPCGECSRAITEFLSRYPHVTLFIYIARLY |
| sequence | | HHADPRNRQGLRDLISSGVTIQIMTEQESG |
| | | YCWRNFVNYSPSNEAHWPRYPHLWVRGLPP |
| | | CLNILRRKQPQLTFFTIALQSCHYQRLPPH |
| | | ILWATGLK |
| rAPOBEC-1 | 1422 | MSSETGPVAVDPTLRRRIEPHEFEVFFDPR |
| (delta | | ELRKETCLLYEINWGGRHSIWRHTSQNTNK |
| 202-213) | | HVEVNFIEKFTTERYFCPNTRCSITWFLSW |
| polypeptide | | SPCGECSRAITEFLSRYPHVTLFIYIARLY |
| sequence | | HHADPRNRQGLRDLISSGVTIQIMTEQESG |
| | | YCWRNFVNYSPSNEAHWPRYPHLWVRLYVL |
| | | ELYCIILGLPPCLNILRRKQPQHYQRLPPH |
| | | ILWATGLK |
| mouse AID | 1373 | MDSLLMKQKKFLYHFKNVRWAKGRHETYLC |
| (mAPOBEC-4) | | YVVKRRDSATSCSLDFGHLRNKSGCHVELL |
| polypeptide | | FLRYISDWDLDPGRCYRVTWFTSWSPCYDC |
| sequence | | ARHVAEFLRWNPNLSLRIFTARLYFCEDRK |
| | | AEPEGLRRLHRAGVQIGIMTFKDYFYCWNT |
| | | FVENRERTFKAWEGLHENSVRLTRQLRRIL |
| | | LPLYEVDDLRDAFRMLGF |
| pmCDA-1 | 1417 | MAGYECVRVSEKLDFDTFEFQFENLHYATE |
| polypeptide | | RHRTYVIFDVKPQSAGGRSRRLWGYIINNP |
| sequence | | NVCHAELILMSMIDRHLESNPGVYAMTWYM |
| | | SWSPCANCSSKLNPWLKNLLEEQGHTLTMH |
| | | FSRIYDRDREGDHRGLRGLKHVSNSFRMGV |
| | | VGRAEVKECLAEYVEASRRTLTWLDTTESM |
| | | AAKMRRKLFCILVRCAGMRESGIPLHLFTL |
| | | QTPLLSGRVVWWRV |
| pmCDA-2 | 1418 | MELREVVDCALASCVRHEPLSRVAFLRCFA |
| polypeptide | | APSQKPRGTVILFYVEGAGRGVTGGHAVNY |
| sequence | | NKQGTSIHAEVLLLSAVRAALLRRRRCEDG |
| | | EEATRGCTLHCYSTYSPCRDCVEYIQEFGA |
| | | STGVRWIHCCRLYELDVNRRRSEAEGVLRS |
| | | LSRLGRDFRLMGPRDAIALLLGGRLANTAD |
| | | GESGASGNAWVTETNVVEPLVDMTGFGDED |
| | | LHAQVQRNKQIREAY |
| | | ANYASAVSLMLGELHVDPDKFPFLAEFLAQ |
| | | TSVEPSGTPRETRGRPRGASSRGPEIGRQR |
| | | PADFERALGAYGLFLHPRIVSREADREEIK |
| | | RDLIVVMRKHNYQGP |
| pmCDA-5 | 1419 | MAGDENVRVSEKLDFDTFEFQFENLHYATE |
| polypeptide | | RHRTYVIFDVKPQSAGGRSRRLWGYIINNP |
| sequence | | NVCHAELILMSMIDRHLESNPGVYAMTWYM |
| | | SWSPCANCSSKLNPWLKNLLEEQGHTLMMH |
| | | FSRIYDRDREGDHRGLRGLKHVSNSFRMGW |
| | | GRAEVKECLAEYVEASRRTLTWLDTTESMA |
| | | AKMRRKLFCILVRCAGMRESGMPLHLFT |
| yCD | 1420 | MVTGGMASKWDQKGMDIAYEEAALGYKEGG |
| polypeptide | | VPIGGCLINNKDGSVLGRGHNMRFQKGSAT |
| sequence | | LHGEISTLENCGRLEGKVYKDTTLYTTLSP |
| | | CDMCTGAIIMYGIPRCVVGENVNFKSKGEK |
| | | YLQTRGHEVVVVDDERCKKIMKQFIDERPQ |
| | | DWFEDIGE |
| NLS | 84 | KRTADGSEFESPKKKRKV |
| NLS | 85 | KRPAATKKAGQAKKKK |
| NLS | 86 | KKTELQTTNAENKTKKL |
| NLS | 87 | KRGINDRNFWRGENGRKTR |
| NLS | 88 | RKSGKIAAIWKRPRK |
| NLS | 89 | PKKKRKV |
| NLS | 90 | MDSLLMNRRKFLYQFKNVRWAKGRRETYLC |
| WT cas9 | 223 | MDKKYSIGLDIGTNSVGWAVITDEYKVPSK |
| domain | | KFKVLGNTDRHSIKKNLIGALLFDSGETAE |
| | | ATRLKRTARRRYTRRKNRICYLQEIFSNEM |
| | | AKVDDSFFHRLEESFLVEEDKKHERHPIFG |
| | | NIVDEVAYHEKYPTIYHLRKKLVDSTDKAD |
| | | LRLIYLALAHMIKFRGHFLIEGDLNPDNSD |
| | | VDKLFIQLVQTYNQLFEENPINASGVDAKA |
| | | ILSARLSKSRRLENLIAQLPGEKKNGLFGN |
| | | LIALSLGLTPNFKSNFDLAEDAKLQLSKDT |
| | | YDDDLDNLLAQIGDQYADLFLAAKNLSDAI |
| | | LLSDILRVNTEITKAPLSASMIKRYDEHHQ |
| | | DLTLLKALVRQQLPEKYKEIFFDQSKNGYA |
| | | GYIDGGASQEEFYKFIKPILEKMDGTEELL |
| | | VKLNREDLLRKQRTFDNGSIPHQIHLGELH |
| | | AILRRQEDFYPFLKDNREKIEKILTFRIPY |
| | | YVGPLARGNSRFAWMTRKSEETITPWNFEE |
| | | VVDKGASAQSFIERMTNFDKNLPNEKVLPK |
| | | HSLLYEYFTVYNELTKVKYVTEGMRKPAFL |
| | | SGEQKKAIVDLLFKTNRKVTVKQLKEDYFK |
| | | KIECFDSVEISGVEDRFNASLGTYHDLLKI |
| | | IKDKDFLDNEENEDILEDIVLTLTLFEDRE |
| | | MIEERLKTYAHLFDDKVMKQLKRRRYTGWG |
| | | RLSRKLINGIRDKQSGKTILDFLKSDGFAN |
| | | RNFMQLIHDDSLTFKEDIQKAQVSGQGDSL |
| | | HEHIANLAGSPAIKKGILQTVKVVDELVKV |
| | | MGRHKPENIVIEMARENQTTQKGQKNSRER |
| | | MKRIEEGIKELGSQILKEHPVENTQLQNEK |
| | | LYLYYLQNGRDMYVDQELDINRLSDYDVDH |
| | | IVPQSFLKDDSIDNKVLTRSDKNRGKSDNV |
| | | PSEEVVKKMKNYWRQLLNAKLITQRKFDNL |
| | | TKAERGGLSELDKAGFIKRQLVETRQITKH |
| | | VAQILDSRMNTKYDENDKLIREVKVITLKS |
| | | KLVSDFRKDFQFYKVREINNYHHAHDAYLN |
| | | AWGTALIKKYPKLESEFVYGDYKVYDVRKM |
| | | IAKSEQEIGKATAKYFFYSNIMNFFKTEIT |
| | | LANGEIRKRPLIETNGETGEIVWDKGRDFA |
| | | TVRKVLSMPQVNIVKKTEVQTGGFSKESIL |
| | | PKRNSDKLIARKKDWDPKKYGGFDSPTVAY |
| | | SVLVVAKVEKGKSKKLKSVKELLGITIMER |
| | | SSFEKNPIDFLEAKGYKEVKKDLIIKLPKY |
| | | SLFELENGRKRMLASAGELQKGNELALPSK |
| | | YVNFLYLASHYEKLKGSPEDNEQKQLFVEQ |
| | | HKHYLDEIIEQISEFSKRVILADANLDKVL |
| | | SAYNKHRDKPIREQAENIIHLFTLTNLGAP |
| | | AAFKYFDTTIDRKRYTSTKEVLDATLIHQS |
| | | ITGLYETRIDLSQLGGD |
| gRNA | 230 | GUUUUAGAGCUAGAAAUAGCAAGUUAAAAU |
| scaffold | | AAGGCUAGUCCGUUAUCAACUUGAAAAAGU |
| nucleotide | | GGGACCGAGUCGGUGCUUUU |
| sequence | | |
| wild type | 231 | ATGGATAAGAAATACTCAATAGGCTTAGAT |
| spCas9 | | ATCGGCACAAATAGCGTCGGATGGGCGGTG |
| poly- | | ATCACTGATGATTATAAGGTTCCGTCTAAA |
| nucleotide | | AAGTTCAAGGTTCTGGGAAATACAGACCGC |
| sequence | | CACAGTATCAAAAAAAATCTTATAGGGGCT |
| | | CTTTTATTTGGCAGTGGAGAGACAGCGGAA |
| | | GCGACTCGTCTCAAACGGACAGCTCGTAGA |
| | | AGGTATACACGTCGGAAGAATCGTATTTGT |
| | | TATCTACAGGAGATTTTTTCAAATGAGATG |
| | | GCGAAAGTAGATGATAGTTTCTTTCATCGA |
| | | CTTGAAGAGTCTTTTTTGGTGGAAGAAGAC |
| | | AAGAAGCATGAACGTCATCCTATTTTTGGA |
| | | AATATAGTAGATGAAGTTGCTTATCATGAG |
| | | AAATATCCAACTATCTATCATCTGCGAAAA |
| | | AAATTGGCAGATTCTACTGATAAAGCGGAT |
| | | TTGCGCTTAATCTATTTGGCCTTAGCGCAT |
| | | ATGATTAAGTTTCGTGGTCATTTTTTGATT |
| | | GAGGGAGATTTAAATCCTGATAATAGTGAT |
| | | GTGGACAAACTATTTATCCAGTTGGTACAA |
| | | ATCTACAATCAATTATTTGAAGAAAACCCT |
| | | ATTAACGCAAGTAGAGTAGATGCTAAAGCG |
| | | ATTCTTTCTGCACGATTGAGTAAATCAAGA |
| | | CGATTAGAAAATCTCATTGCTCAGCTCCCC |
| | | GGTGAGAAGAGAAATGGCTTGTTTGGGAAT |
| | | CTCATTGCTTTGTCATTGGGATTGACCCCT |
| | | AATTTTAAATCAAATTTTGATTTGGCAGAA |
| | | GATGCTAAATTACAGCTTTCAAAAGATACT |
| | | TACGATGATGATTTAGATAATTTATTGGCG |
| | | CAAATTGGAGATCAATATGCTGATTTGTTT |
| | | TTGGCAGCTAAGAATTTATCAGATGCTATT |
| | | TTACTTTCAGATATCCTAAGAGTAAATAGT |
| | | GAAATAACTAAGGCTCCCCTATCAGCTTCA |
| | | ATGATTAAGCGCTACGATGAACATCATCAA |
| | | GACTTGACTCTTTTAAAAGCTTTAGTTCGA |
| | | CAACAACTTCCAGAAAAGTATAAAGAAATC |
| | | TTTTTTGATCAATCAAAAAACGGATATGCA |
| | | GGTTATATTGATGGGGGAGCTAGCCAAGAA |
| | | GAATTTTATAAATTTATCAAACCAATTTTA |
| | | GAAAAAATGGATGGTACTGAGGAATTATTG |
| | | GTGAAACTAAATCGTGAAGATTTGCTGCGC |
| | | AAGCAACGGACCTTTGACAACGGCTCTATT |
| | | CCCCATCAAATTCACTTGGGTGAGCTGCAT |
| | | GCTATTTTGAGAAGACAAGAAGACTTTTAT |
| | | CCATTTTTAAAAGACAATCGTGAGAAGATT |
| | | GAAAAAATCTTGACTTTTCGAATTCCTTAT |
| | | TATGTTGGTCCATTGGCGCGTGGCAATAGT |
| | | CGTTTTGCATGGATGACTCGGAAGTCTGAA |
| | | GAAACAATTACCCCATGGAATTTTGAAGAA |
| | | GTTGTCGATAAAGGTGCTTCAGCTCAATCA |
| | | TTTATTGAACGCATGACAAACTTTGATAAA |
| | | AATCTTCCAAATGAAAAAGTACTACCAAAA |
| | | CATAGTTTGCTTTATGAGTATTTTACGGTT |
| | | TATAACGAATTGACAAAGGTCAAATATGTT |
| | | ACTGAGGGAATGCGAAAACCAGCATTTCTT |
| | | TCAGGTGAACAGAAGAAAGCCATTGTTGAT |
| | | TTACTCTTCAAAACAAATCGAAAAGTAACC |
| | | GTTAAGCAATTAAAAGAAGATTATTTCAAA |
| | | AAAATAGAATGTTTTGATAGTGTTGAAATT |
| | | TCAGGAGTTGAAGATAGATTTAATGCTTCA |
| | | TTAGGCGCCTACCATGATTTGCTAAAAATT |
| | | ATTAAAGATAAAGATTTTTTGGATAATGAA |
| | | GAAAATGAAGATATCTTAGAGGATATTGTT |
| | | TTAACATTGACCTTATTTGAAGATAGGGGG |
| | | ATGATTGAGGAAAGACTTAAAACATATGCT |
| | | CACCTCTTTGATGATAAGGTGATGAAACAG |
| | | CTTAAACGTCGCCGTTATACTGGTTGGGGA |
| | | CGTTTGTCTCGAAAATTGATTAATGGTATT |
| | | AGGGATAAGCAATCTGGCAAAACAATATTA |
| | | GATTTTTTGAAATCAGATGGTTTTGCCAAT |
| | | CGCAATTTTATGCAGCTGATCCATGATGAT |
| | | AGTTTGACATTTAAAGAAGATATTCAAAAA |
| | | GCACAGGTGTCTGGACAAGGCCATAGTTTA |
| | | CATGAACAGATTGCTAACTTAGCTGGCAGT |
| | | CCTGCTATTAAAAAAGGTATTTTACAGACT |
| | | GTAAAAATTGTTGATGAACTGGTCAAAGTA |
| | | ATGGGGCATAAGCCAGAAAATATCGTTATT |
| | | GAAATGGCACGTGAAAATCAGACAACTCAA |
| | | AAGGGCCAGAAAAATTCGCGAGAGCGTATG |
| | | AAACGAATCGAAGAAGGTATCAAAGAATTA |
| | | GGAAGTCAGATTCTTAAAGAGCATCCTGTT |
| | | GAAAATACTCAATTGCAAAATGAAAAGCTC |
| | | TATCTCTATTATCTACAAAATGGAAGAGAC |
| | | ATGTATGTGGACCAAGAATTAGATATTAAT |
| | | CGTTTAAGTGATTATGATGTCGATCACATT |
| | | GTTCCACAAAGTTTCATTAAAGACGATTCA |
| | | ATAGACAATAAGGTACTAACGCGTTCTGAT |
| | | AAAAATCGTGGTAAATCGGATAACGTTCCA |
| | | AGTGAAGAAGTAGTCAAAAAGATGAAAAAC |
| | | TATTGGAGACAACTTCTAAACGCCAAGTTA |
| | | ATCACTCAACGTAAGTTTGATAATTTAACG |
| | | AAAGCTGAACGTGGAGGTTTGAGTGAACTT |
| | | GATAAAGCTGGTTTTATCAAACGCCAATTG |
| | | GTTGAAACTCGCCAAATCACTAAGCATGTG |
| | | GCACAAATTTTGGATAGTCGCATGAATACT |
| | | AAATACGATGAAAATGATAAACTTATTCGA |
| | | GAGGTTAAAGTGATTACCTTAAAATCTAAA |
| | | TTAGTTTCTGACTTCCGAAAAGATTTCCAA |
| | | TTCTATAAAGTACGTGAGATTAACAATTAC |
| | | CATCATGCCCATGATGCGTATCTAAATGCC |
| | | GTCGTTGGAACTGCTTTGATTAAGAAATAT |
| | | CCAAAACTTGAATCGGAGTTTGTCTATGGT |
| | | GATTATAAAGTTTATGATGTTCGTAAAATG |
| | | ATTGCTAAGTCTGAGCAAGAAATAGGCAAA |
| | | GCAACCGCAAAATATTTCTTTTACTCTAAT |
| | | ATCATGAACTTCTTCAAAACAGAAATTACA |
| | | CTTGCAAATGGAGAGATTCGCAAACGCCCT |
| | | CTAATCGAAACTAATGGGGAAACTGGAGAA |
| | | ATTGTCTGGGATAAAGGGCGAGATTTTGCC |
| | | ACAGTGCGCAAAGTATTGTCCATGCCCCAA |
| | | GTCAATATTGTCAAGAAAACAGAAGTACAG |
| | | ACAGGCGGATTCTCCAAGGAGTCAATTTTA |
| | | CCAAAAAGAAATTCGGACAAGCTTATTGCT |
| | | CGTAAAAAAGACTGGGATCCAAAAAAATAT |
| | | GGTGGTTTTGATAGTCCAACGGTAGCTTAT |
| | | TCAGTCCTAGTGGTTGCTAAGGTGGAAAAA |
| | | GGGAAATCGAAGAAGTTAAAATCCGTTAAA |
| | | GAGTTACTAGGGATCACAATTATGGAAAGA |
| | | AGTTCCTTTGAAAAAAATCCGATTGACTTT |
| | | TTAGAAGCTAAAGGATATAAGGAAGTTAAA |
| | | AAAGACTTAATCATTAAACTACCTAAATAT |
| | | AGTCTTTTTGAGTTAGAAAACGGTCGTAAA |
| | | CGGATGCTGGCTAGTGCCGGAGAATTACAA |
| | | AAAGGAAATGAGCTGGCTCTGCCAAGCAAA |
| | | TATGTGAATTTTTTATATTTAGCTAGTCAT |
| | | TATGAAAAGTTGAAGGGTAGTCCAGAAGAT |
| | | AACGAACAAAAACAATTGTTTGTGGAGCAG |
| | | CATAAGCATTATTTAGATGAGATTATTGAG |
| | | CAAATCAGTGAATTTTCTAAGCGTGTTATT |
| | | TTAGCAGATGCCAATTTAGATAAAGTTCTT |
| | | AGTGCATATAACAAACATAGAGACAAACCA |
| | | ATACGTGAACAAGCAGAAAATATTATTCAT |
| | | TTATTTACGTTGACGAATCTTGGAGCTCCC |
| | | GCTGCTTTTAAATATTTTGATACAACAATT |
| | | GATCGTAAACGATATACGTCTACAAAAGAA |
| | | GTTTTAGATGCCACTCTTATCCATCAATCC |
| | | ATCACTGGTCTTTATGAAACACGCATTGAT |
| | | TTGAGTCAGCTAGGAGGTGACTGA |
| spCas9 | 232 | MDKKYSIGLDIGTNSVGWAVITDDYKVPSK |
| polypeptide | | KFKVLGNTDRHSIKKNLIGALLFGSGETAE |
| sequence | | ATRLKRTARRRYTRRKNRICYLQEIFSNEM |
| | | AKVDDSFFHRLEESFLVEEDKKHERHPIFG |
| | | NIVDEVAYHEKYPTIYHLRKKLADSTDKAD |
| | | LRLIYLALAHMIKFRGHFLIEGDLNPDNSD |
| | | VDKLFIQLVQIYNQLFEENPINASRVDAKA |
| | | ILSARLSKSRRLENLIAQLPGEKRNGLFGN |
| | | LIALSLGLTPNFKSNFDLAEDAKLQLSKDT |
| | | YDDDLDNLLAQIGDQYADLFLAAKNLSDAI |
| | | LLSDILRVNSEITKAPLSASMIKRYDEHHQ |
| | | DLTLLKALVRQQLPEKYKEIFFDQSKNGYA |
| | | GYIDGGASQEEFYKFIKPILEKMDGTEELL |
| | | VKLNREDLLRKQRTFDNGSIPHQIHLGELH |
| | | AILRRQEDFYPFLKDNREKIEKILTFRIPY |
| | | YVGPLARGNSRFAWMTRKSEETITPWNFEE |
| | | VVDKGASAQSFIERMTNFDKNLPNEKVLPK |
| | | HSLLYEYFTVYNELTKVKYVTEGMRKPAFL |
| | | SGEQKKAIVDLLFKTNRKVTVKQLKEDYFK |
| | | KIECFDSVEISGVEDRFNASLGAYHDLLKI |
| | | IKDKDFLDNEENEDILEDIVLTLTLFEDRG |
| | | MIEERLKTYAHLFDDKVMKQLKRRRYTGWG |
| | | RLSRKLINGIRDKQSGKTILDFLKSDGFAN |
| | | RNFMQLIHDDSLTFKEDIQKAQVSGQGHSL |
| | | HEQIANLAGSPAIKKGILQTVKIVDELVKV |
| | | MGHKPENIVIEMARENQTTQKGQKNSRERM |
| | | KRIEEGIKELGSQILKEHPVENTQLQNEKL |
| | | YLYYLQNGRDMYVDQELDINRLSDYDVDHI |
| | | VPQSFIKDDSIDNKVLTRSDKNRGKSDNVP |
| | | SEEWKKMKNYWRQLLNAKLITQRKFDNLTK |
| | | AERGGLSELDKAGFIKRQLVETRQITKHVA |
| | | QILDSRMNTKYDENDKLIREVKVITLKSKL |
| | | VSDFRKDFQFYKVREINNYHHAHDAYLNAV |
| | | VGTALIKKYPKLESEFVYGDYKVYDVRKMI |
| | | AKSEQEIGKATAKYFFYSNIMNFFKTEITL |
| | | ANGEIRKRPLIETNGETGEIVWDKGRDFAT |
| | | VRKVLSMPQVNIVKKTEVQTGGFSKESILP |
| | | KRNSDKLIARKKDWDPKKYGGFDSPTVAYS |
| | | VLVVAKVEKGKSKKLKSVKELLGITIMERS |
| | | SFEKNPIDFLEAKGYKEVKKDLIIKLPKYS |
| | | LFELENGRKRMLASAGELQKGNELALPSKY |
| | | VNFLYLASHYEKLKGSPEDNEQKQLFVEQH |
| | | KHYLDEIIEQISEFSKRVILADANLDKVLS |
| | | AYNKHRDKPIREQAENIIHLFTLTNLGAPA |
| | | AFKYFDTTIDRKRYTSTKEVLDATLIHQSI |
| | | TGLYETRIDLSQLGGD |
| wild- | 235 | ATGGATAAAAAGTATTCTATTGGTTTAGAC |
| type | | ATCGGCACTAATTCCGTTGGATGGGCTGTC |
| Cas9 | | ATAACCGATGAATACAAAGTACCTTCAAAG |
| poly- | | AAATTTAAGGTGTTGGGGAACACAGACCGT |
| nucleotide | | CATTCGATTAAAAAGAATCTTATCGGTGCC |
| sequence | | CTCCTATTCGATAGTGGCGAAACGGCAGAG |
| | | GCGACTCGCCTGAAACGAACCGCTCGGAGA |
| | | AGGTATACACGTCGCAAGAACCGAATATGT |
| | | TACTTACAAGAAATTTTTAGCAATGAGATG |
| | | GCCAAAGTTGACGATTCTTTCTTTCACCGT |
| | | TTGGAAGAGTCCTTCCTTGTCGAAGAGGAC |
| | | AAGAAACATGAACGGCACCCCATCTTTGGA |
| | | AACATAGTAGATGAGGTGGCATATCATGAA |
| | | AAGTACCCAACGATTTATCACCTCAGAAAA |
| | | AAGCTAGTTGACTCAACTGATAAAGCGGAC |
| | | CTGAGGTTAATCTACTTGGCTCTTGCCCAT |
| | | ATGATAAAGTTCCGTGGGCACTTTCTCATT |
| | | GAGGGTGATCTAAATCCGGACAACTCGGAT |
| | | GTCGACAAACTGTTCATCCAGTTAGTACAA |
| | | ACCTATAATCAGTTGTTTGAAGAGAACCCT |
| | | ATAAATGCAAGTGGCGTGGATGCGAAGGCT |
| | | ATTCTTAGCGCCCGCCTCTCTAAATCCCGA |
| | | CGGCTAGAAAACCTGATCGCACAATTACCC |
| | | GGAGAGAAGAAAAATGGGTTGTTCGGTAAC |
| | | CTTATAGCGCTCTCACTAGGCCTGACACCA |
| | | AATTTTAAGTCGAACTTCGACTTAGCTGAA |
| | | GATGCCAAATTGCAGCTTAGTAAGGACACG |
| | | TACGATGACGATCTCGACAATCTACTGGCA |
| | | CAAATTGGAGATCAGTATGCGGACTTATTT |
| | | TTGGCTGCCAAAAACCTTAGCGATGCAATC |
| | | CTCCTATCTGACATACTGAGAGTTAATACT |
| | | GAGATTACCAAGGCGCCGTTATCCGCTTCA |
| | | ATGATCAAAAGGTACGATGAACATCACCAA |
| | | GACTTGACACTTCTCAAGGCCCTAGTCCGT |
| | | CAGCAACTGCCTGAGAAATATAAGGAAATA |
| | | TTCTTTGATCAGTCGAAAAACGGGTACGCA |
| | | GGTTATATTGACGGCGGAGCGAGTCAAGAG |
| | | GAATTCTACAAGTTTATCAAACCCATATTA |
| | | GAGAAGATGGATGGGACGGAAGAGTTGCTT |
| | | GTAAAACTCAATCGCGAAGATCTACTGCGA |
| | | AAGCAGCGGACTTTCGACAACGGTAGCATT |
| | | CCACATCAAATCCACTTAGGCGAATTGCAT |
| | | GCTATACTTAGAAGGCAGGAGGATTTTTAT |
| | | CCGTTCCTCAAAGACAATCGTGAAAAGATT |
| | | GAGAAAATCCTAACCTTTCGCATACCTTAC |
| | | TATGTGGGACCCCTGGCCCGAGGGAACTCT |
| | | CGGTTCGCATGGATGACAAGAAAGTCCGAA |
| | | GAAACGATTACTCCATGGAATTTTGAGGAA |
| | | GTTGTCGATAAAGGTGCGTCAGCTCAATCG |
| | | TTCATCGAGAGGATGACCAACTTTGACAAG |
| | | AATTTACCGAACGAAAAAGTATTGCCTAAG |
| | | CACAGTTTACTTTACGAGTATTTCACAGTG |
| | | TACAATGAACTCACGAAAGTTAAGTATGTC |
| | | ACTGAGGGCATGCGTAAACCCGCCTTTCTA |
| | | AGCGGAGAACAGAAGAAAGCAATAGTAGAT |
| | | CTGTTATTCAAGACCAACCGCAAAGTGACA |
| | | GTTAAGCAATTGAAAGAGGACTACTTTAAG |
| | | AAAATTGAATGCTTCGATTCTGTCGAGATC |
| | | TCCGGGGTAGAAGATCGATTTAATGCGTCA |
| | | CTTGGTACGTATCATGACCTCCTAAAGATA |
| | | ATTAAAGATAAGGACTTCCTGGATAACGAA |
| | | GAGAATGAAGATATCTTAGAAGATATAGTG |
| | | TTGACTCTTACCCTCTTTGAAGATCGGGAA |
| | | ATGATTGAGGAAAGACTAAAAACATACGCT |
| | | CACCTGTTCGACGATAAGGTTATGAAACAG |
| | | TTAAAGAGGCGTCGCTATACGGGCTGGGGA |
| | | CGATTGTCGCGGAAACTTATCAACGGGATA |
| | | AGAGACAAGCAAAGTGGTAAAACTATTCTC |
| | | GATTTTCTAAAGAGCGACGGCTTCGCCAAT |
| | | AGGAACTTTATGCAGCTGATCCATGATGAC |
| | | TCTTTAACCTTCAAAGAGGATATACAAAAG |
| | | GCACAGGTTTCCGGACAAGGGGACTCATTG |
| | | CACGAACATATTGCGAATCTTGCTGGTTCG |
| | | CCAGCCATCAAAAAGGGCATACTCCAGACA |
| | | GTCAAAGTAGTGGATGAGCTAGTTAAGGTC |
| | | ATGGGACGTCACAAACCGGAAAACATTGTA |
| | | ATCGAGATGGCACGCGAAAATCAAACGACT |
| | | CAGAAGGGGCAAAAAAACAGTCGAGAGCGG |
| | | ATGAAGAGAATAGAAGAGGGTATTAAAGAA |
| | | CTGGGCAGCCAGATCTTAAAGGAGCATCCT |
| | | GTGGAAAATACCCAATTGCAGAACGAGAAA |
| | | CTTTACCTCTATTACCTACAAAATGGAAGG |
| | | GACATGTATGTTGATCAGGAACTGGACATA |
| | | AACCGTTTATCTGATTACGACGTCGATCAC |
| | | ATTGTACCCCAATCCTTTTTGAAGGACGAT |
| | | TCAATCGACAATAAAGTGCTTACACGCTCG |
| | | GATAAGAACCGAGGGAAAAGTGACAATGTT |
| | | CCAAGCGAGGAAGTCGTAAAGAAAATGAAG |
| | | AACTATTGGCGGCAGCTCCTAAATGCGAAA |
| | | CTGATAACGCAAAGAAAGTTCGATAACTTA |
| | | ACTAAAGCTGAGAGGGGTGGCTTGTCTGAA |
| | | CTTGACAAGGCCGGATTTATTAAACGTCAG |
| | | CTCGTGGAAACCCGCCAAATCACAAAGCAT |
| | | GTTGCACAGATACTAGATTCCCGAATGAAT |
| | | ACGAAATACGACGAGAACGATAAGCTGATT |
| | | CGGGAAGTCAAAGTAATCACTTTAAAGTCA |
| | | AAATTGGTGTCGGACTTCAGAAAGGATTTT |
| | | CAATTCTATAAAGTTAGGGAGATAAATAAC |
| | | TACCACCATGCGCACGACGCTTATCTTAAT |
| | | GCCGTCGTAGGGACCGCACTCATTAAGAAA |
| | | TACCCGAAGCTAGAAAGTGAGTTTGTGTAT |
| | | GGTGATTACAAAGTTTATGACGTCCGTAAG |
| | | ATGATCGCGAAAAGCGAACAGGAGATAGGC |
| | | AAGGCTACAGCCAAATACTTCTTTTATTCT |
| | | AACATTATGAATTTCTTTAAGACGGAAATC |
| | | ACTCTGGCAAACGGAGAGATACGCAAACGA |
| | | CCTTTAATTGAAACCAATGGGGAGACAGGT |
| | | GAAATCGTATGGGATAAGGGCCGGGACTTC |
| | | GCGACGGTGAGAAAAGTTTTGTCCATGCCC |
| | | CAAGTCAACATAGTAAAGAAAACTGAGGTG |
| | | CAGACCGGAGGGTTTTCAAAGGAATCGATT |
| | | CTTCCAAAAAGGAATAGTGATAAGCTCATC |
| | | GCTCGTAAAAAGGACTGGGACCCGAAAAAG |
| | | TACGGTGGCTTCGATAGCCCTACAGTTGCC |
| | | TATTCTGTCCTAGTAGTGGCAAAAGTTGAG |
| | | AAGGGAAAATCCAAGAAACTGAAGTCAGTC |
| | | AAAGAATTATTGGGGATAACGATTATGGAG |
| | | CGCTCGTCTTTTGAAAAGAACCCCATCGAC |
| | | TTCCTTGAGGCGAAAGGTTACAAGGAAGTA |
| | | AAAAAGGATCTCATAATTAAACTACCAAAG |
| | | TATAGTCTGTTTGAGTTAGAAAATGGCCGA |
| | | AAACGGATGTTGGCTAGCGCCGGAGAGCTT |
| | | CAAAAGGGGAACGAACTCGCACTACCGTCT |
| | | AAATACGTGAATTTCCTGTATTTAGCGTCC |
| | | CATTACGAGAAGTTGAAAGGTTCACCTGAA |
| | | GATAACGAACAGAAGCAACTTTTTGTTGAG |
| | | CAGCACAAACATTATCTCGACGAAATCATA |
| | | GAGCAAATTTCGGAATTCAGTAAGAGAGTC |
| | | ATCCTAGCTGATGCCAATCTGGACAAAGTA |
| | | TTAAGCGCATACAACAAGCACAGGGATAAA |
| | | CCCATACGTGAGCAGGCGGAAAATATTATC |
| | | CATTTGTTTACTCTTACCAACCTCGGCGCT |
| | | CCAGCCGCATTCAAGTATTTTGACACAACG |
| | | ATAGATCGCAAACGATACACTTCTACCAAG |
| | | GAGGTGCTAGACGCGACACTGATTCACCAA |
| | | TCCATCACGGGATTATATGAAACTCGGATA |
| | | GATTTGTCACAGCTTGGGGGTGACGGATCC |
| | | CCCAAGAAGAAGAGGAAAGTCTCGAGCGAC |
| | | TACAAAGACCATGACGGTGATTATAAAGAT |
| | | CATGACATCGATTACAAGGATGACGATGAC |
| | | AAGGCTGCAGGA |
| wild-type | 236 | MDKKYSIGLAIGTNSVGWAVITDEYKVPSK |
| Cas9 | | KFKVLGNTDRHSIKKNLIGALLFDSGETAE |
| polypeptide | | ATRLKRTARRRYTRRKNRICYLQEIFSNEM |
| sequence | | AKVDDSFFHRLEESFLVEEDKKHERHPIFG |
| | | NIVDEVAYHEKYPTIYHLRKKLVDSTDKAD |
| | | LRLIYLALAHMIKFRGHFLIEGDLNPDNSD |
| | | VDKLFIQLVQTYNQLFEENPINASGVDAKA |
| | | ILSARLSKSRRLENLIAQLPGEKKNGLFGN |
| | | LIALSLGLTPNFKSNFDLAEDAKLQLSKDT |
| | | YDDDLDNLLAQIGDQYADLFLAAKNLSDAI |
| | | LLSDILRVNTEITKAPLSASMIKRYDEHHQ |
| | | DLTLLKALVRQQLPEKYKEIFFDQSKNGYA |
| | | GYIDGGASQEEFYKFIKPILEKMDGTEELL |
| | | VKLNREDLLRKQRTFDNGSIPHQIHLGELH |
| | | AILRRQEDFYPFLKDNREKIEKILTFRIPY |
| | | YVGPLARGNSRFAWMTRKSEETITPWNFEE |
| | | VVDKGASAQSFIERMTNFDKNLPNEKVLPK |
| | | HSLLYEYFTVYNELTKVKYVTEGMRKPAFL |
| | | SGEQKKAIVDLLFKTNRKVTVKQLKEDYFK |
| | | KIECFDSVEISGVEDRFNASLGTYHDLLKI |
| | | IKDKDFLDNEENEDILEDIVLTLTLFEDRE |
| | | MIEERLKTYAHLFDDKVMKQLKRRRYTGWG |
| | | RLSRKLINGIRDKQSGKTILDFLKSDGFAN |
| | | RNFMQLIHDDSLTFKEDIQKAQVSGQGDSL |
| | | HEHIANLAGSPAIKKGILQTVKWDELVKVM |
| | | GRHKPENIVIEMARENQTTQKGQKNSRERM |
| | | KRIEEGIKELGSQILKEHPVENTQLQNEKL |
| | | YLYYLQNGRDMYVDQELDINRLSDYDVDHI |
| | | VPQSFLKDDSIDNKVLTRSDKNRGKSDNVP |
| | | SEEVVKKMKNYWRQLLNAKLITQRKFDNLT |
| | | KAERGGLSELDKAGFIKRQLVETRQITKHV |
| | | AQILDSRMNTKYDENDKLIREVKVITLKSK |
| | | LVSDFRKDFQFYKVREINNYHHAHDAYLNA |
| | | WGTALIKKYPKLESEFVYGDYKVYDVRKMI |
| | | AKSEQEIGKATAKYFFYSNIMNFFKTEITL |
| | | ANGEIRKRPLIETNGETGEIVWDKGRDFAT |
| | | VRKVLSMPQVNIVKKTEVQTGGFSKESILP |
| | | KRNSDKLIARKKDWDPKKYGGFDSPTVAYS |
| | | VLVVAKVEKGKSKKLKSVKELLGITIMERS |
| | | SFEKNPIDFLEAKGYKEVKKDLIIKLPKYS |
| | | LFELENGRKRMLASAGELQKGNELALPSKY |
| | | VNFLYLASHYEKLKGSPEDNEQKQLFVEQH |
| | | KHYLDEIIEQISEFSKRVILADANLDKVLS |
| | | AYNKHRDKPIREQAENIIHLFTLTNLGAPA |
| | | AFKYFDTTIDRKRYTSTKEVLDATLIHQSI |
| | | TGLYETRIDLSQLGGD |
| Cas9 from | 237 | ATGGATAAGAAATACTCAATAGGCTTAGAT |
| Strepto- | | ATCGGCACAAATAGCGTCGGATGGGCGGTG |
| coccus | | ATCACTGATGAATATAAGGTTCCGTCTAAA |
| pyogenes | | AAGTTCAAGGTTCTGGGAAATACAGACCGC |
| (NCBI | | CACAGTATCAAAAAAAATCTTATAGGGGCT |
| Ref. Seq.: | | CTTTTATTTGACAGTGGAGAGACAGCGGAA |
| NC_002737.2) | | GCGACTCGTCTCAAACGGACAGCTCGTAGA |
| poly- | | AGGTATACACGTCGGAAGAATCGTATTTGT |
| nucleotide | | TATCTACAGGAGATTTTTTCAAATGAGATG |
| sequence | | GCGAAAGTAGATGATAGTTTCTTTCATCGA |
| | | CTTGAAGAGTCTTTTTTGGTGGAAGAAGAC |
| | | AAGAAGCATGAACGTCATCCTATTTTTGGA |
| | | AATATAGTAGATGAAGTTGCTTATCATGAG |
| | | AAATATCCAACTATCTATCATCTGCGAAAA |
| | | AAATTGGTAGATTCTACTGATAAAGCGGAT |
| | | TTGCGCTTAATCTATTTGGCCTTAGCGCAT |
| | | ATGATTAAGTTTCGTGGTCATTTTTTGATT |
| | | GAGGGAGATTTAAATCCTGATAATAGTGAT |
| | | GTGGACAAACTATTTATCCAGTTGGTACAA |
| | | ACCTACAATCAATTATTTGAAGAAAACCCT |
| | | ATTAACGCAAGTGGAGTAGATGCTAAAGCG |
| | | ATTCTTTCTGCACGATTGAGTAAATCAAGA |
| | | CGATTAGAAAATCTCATTGCTCAGCTCCCC |
| | | GGTGAGAAGAAAAATGGCTTATTTGGGAAT |
| | | CTCATTGCTTTGTCATTGGGTTTGACCCCT |
| | | AATTTTAAATCAAATTTTGATTTGGCAGAA |
| | | GATGCTAAATTACAGCTTTCAAAAGATACT |
| | | TACGATGATGATTTAGATAATTTATTGGCG |
| | | CAAATTGGAGATCAATATGCTGATTTGTTT |
| | | TTGGCAGCTAAGAATTTATCAGATGCTATT |
| | | TTACTTTCAGATATCCTAAGAGTAAATACT |
| | | GAAATAACTAAGGCTCCCCTATCAGCTTCA |
| | | ATGATTAAACGCTACGATGAACATCATCAA |
| | | GACTTGACTCTTTTAAAAGCTTTAGTTCGA |
| | | CAACAACTTCCAGAAAAGTATAAAGAAATC |
| | | TTTTTTGATCAATCAAAAAACGGATATGCA |
| | | GGTTATATTGATGGGGGAGCTAGCCAAGAA |
| | | GAATTTTATAAATTTATCAAACCAATTTTA |
| | | GAAAAAATGGATGGTACTGAGGAATTATTG |
| | | GTGAAACTAAATCGTGAAGATTTGCTGCGC |
| | | AAGCAACGGACCTTTGACAACGGCTCTATT |
| | | CCCCATCAAATTCACTTGGGTGAGCTGCAT |
| | | GCTATRTGAGAAGACAAGAAGACTTTTATC |
| | | CATTTTTAAAAGACAATCGTGAGAAGATTG |
| | | AAAAAATCTTGACTTTTCGAATTCCTTATT |
| | | ATGTTGGTCCATTGGCGCGTGGCAATAGTC |
| | | GTTTTGCATGGATGACTCGGAAGTCTGAAG |
| | | AAACAATTACCCCATGGAATTTTGAAGAAG |
| | | TTGTCGATAAAGGTGCTTCAGCTCAATCAT |
| | | TTATTGAACGCATGACAAACTTTGATAAAA |
| | | ATCTTCCAAATGAAAAAGTACTACCAAAAC |
| | | ATAGTTTGCTTTATGAGTATTTTACGGTTT |
| | | ATAACGAATTGACAAAGGTCAAATATGTTA |
| | | CTGAAGGAATGCGAAAACCAGCATTTCTTT |
| | | CAGGTGAACAGAAGAAAGCCATTGTTGATT |
| | | TACTCTTCAAAACAAATCGAAAAGTAACCG |
| | | TTAAGCAATTAAAAGAAGATTATTTCAAAA |
| | | AAATAGAATGTTTTGATAGTGTTGAAATTT |
| | | CAGGAGTTGAAGATAGATTTAATGCTTCAT |
| | | TAGGTACCTACCATGATTTGCTAAAAATTA |
| | | TTAAAGATAAAGATTTTTTGGATAATGAAG |
| | | AAAATGAAGATATCTTAGAGGATATTGTTT |
| | | TAACATTGACCTTATTTGAAGATAGGGAGA |
| | | TGATTGAGGAAAGACTTAAAACATATGCTC |
| | | ACCTCTTTGATGATAAGGTGATGAAACAGC |
| | | TTAAACGTCGCCGTTATACTGGTTGGGGAC |
| | | GTTTGTCTCGAAAATTGATTAATGGTATTA |
| | | GGGATAAGCAATCTGGCAAAACAATATTAG |
| | | ATTTTTTGAAATCAGATGGTTTTGCCAATC |
| | | GCAATTTTATGCAGCTGATCCATGATGATA |
| | | GTTTGACATTTAAAGAAGACATTCAAAAAG |
| | | CACAAGTGTCTGGACAAGGCGATAGTTTAC |
| | | ATGAACATATTGCAAATTTAGCTGGTAGCC |
| | | CTGCTATTAAAAAAGGTATTTTACAGACTG |
| | | TAAAAGTTGTTGATGAATTGGTCAAAGTAA |
| | | TGGGGCGGCATAAGCCAGAAAATATCGTTA |
| | | TTGAAATGGCACGTGAAAATCAGACAACTC |
| | | AAAAGGGCCAGAAAAATTCGCGAGAGCGTA |
| | | TGAAACGAATCGAAGAAGGTATCAAAGAAT |
| | | TAGGAAGTCAGATTCTTAAAGAGCATCCTG |
| | | TTGAAAATACTCAATTGCAAAATGAAAAGC |
| | | TCTATCTCTATTATCTCCAAAATGGAAGAG |
| | | ACATGTATGTGGACCAAGAATTAGATATTA |
| | | ATCGTTTAAGTGATTATGATGTCGATCACA |
| | | TTGTTCCACAAAGTTTCCTTAAAGACGATT |
| | | CAATAGACAATAAGGTCTTAACGCGTTCTG |
| | | ATAAAAATCGTGGTAAATCGGATAACGTTC |
| | | CAAGTGAAGAAGTAGTCAAAAAGATGAAAA |
| | | ACTATTGGAGACAACTTCTAAACGCCAAGT |
| | | TAATCACTCAACGTAAGTTTGATAATTTAA |
| | | CGAAAGCTGAACGTGGAGGTTTGAGTGAAC |
| | | TTGATAAAGCTGGTTTTATCAAACGCCAAT |
| | | TGGTTGAAACTCGCCAAATCACTAAGCATG |
| | | TGGCACAAATTTTGGATAGTCGCATGAATA |
| | | CTAAATACGATGAAAATGATAAACTTATTC |
| | | GAGAGGTTAAAGTGATTACCTTAAAATCTA |
| | | AATTAGTTTCTGACTTCCGAAAAGATTTCC |
| | | AATTCTATAAAGTACGTGAGATTAACAATT |
| | | ACCATCATGCCCATGATGCGTATCTAAATG |
| | | CCGTCGTTGGAACTGCTTTGATTAAGAAAT |
| | | ATCCAAAACTTGAATCGGAGTTTGTCTATG |
| | | GTGATTATAAAGTTTATGATGTTCGTAAAA |
| | | TGATTGCTAAGTCTGAGCAAGAAATAGGCA |
| | | AAGCAACCGCAAAATATTTCTTTTACTCTA |
| | | ATATCATGAACTTCTTCAAAACAGAAATTA |
| | | CACTTGCAAATGGAGAGATTCGCAAACGCC |
| | | CTCTAATCGAAACTAATGGGGAAACTGGAG |
| | | AAATTGTCTGGGATAAAGGGCGAGATTTTG |
| | | CCACAGTGCGCAAAGTATTGTCCATGCCCC |
| | | AAGTCAATATTGTCAAGAAAACAGAAGTAC |
| | | AGACAGGCGGATTCTCCAAGGAGTCAATTT |
| | | TACCAAAAAGAAATTCGGACAAGCTTATTG |
| | | CTCGTAAAAAAGACTGGGATCCAAAAAAAT |
| | | ATGGTGGTTTTGATAGTCCAACGGTAGCTT |
| | | ATTCAGTCCTAGTGGTTGCTAAGGTGGAAA |
| | | AAGGGAAATCGAAGAAGTTAAAATCCGTTA |
| | | AAGAGTTACTAGGGATCACAATTATGGAAA |
| | | GAAGTTCCTTTGAAAAAAATCCGATTGACT |
| | | TTTTAGAAGCTAAAGGATATAAGGAAGTTA |
| | | AAAAAGACTTAATCATTAAACTACCTAAAT |
| | | ATAGTCTTTTTGAGTTAGAAAACGGTCGTA |
| | | AACGGATGCTGGCTAGTGCCGGAGAATTAC |
| | | AAAAAGGAAATGAGCTGGCTCTGCCAAGCA |
| | | AATATGTGAATFTTTTATATTTAGCTAGTC |
| | | ATTATGAAAAGTTGAAGGGTAGTCCAGAAG |
| | | ATAACGAACAAAAACAATTGTTTGTGGAGC |
| | | AGCATAAGCATTATTTAGATGAGATTATTG |
| | | AGCAAATCAGTGAATTTTCTAAGCGTGTTA |
| | | TTTTAGCAGATGCCAATTTAGATAAAGTTC |
| | | TTAGTGCATATAACAAACATAGAGACAAAC |
| | | CAATACGTGAACAAGCAGAAAATATTATTC |
| | | ATTTATTTACGTTGACGAATCTTGGAGCTC |
| | | CCGCTGCTTTTAAATATTTTGATACAACAA |
| | | TTGATCGTAAACGATATACGTCTACAAAAG |
| | | AAGTTTTAGATGCCACTCTTATCCATCAAT |
| | | CCATCACTGGTCTTTATGAAACACGCATTG |
| | | ATTTGAGTCAGCTAGGAGGTGACTGA |
| catalyt- | 238 | MDKKYSIGLAIGTNSVGWAVITDEYKVPSK |
| ically | | KFKVLGNTDRHSIKKNLIGALLFDSGETAE |
| inactive | | ATRLKRTARRRYTRRKNRICYLQEIFSNEM |
| Cas9 | | AKVDDSFFHRLEESFLVEEDKKHERHPIFG |
| (dCas9) | | NIVDEVAYHEKYPTIYHLRKKLVDSTDKAD |
| polypeptide | | LRLIYLALAHMIKFRGHFLIEGDLNPDNSD |
| sequence | | VDKLFIQLVQTYNQLFEENPINASGVDAKA |
| | | ILSARLSKSRRLENLIAQLPGEKKNGLFGN |
| | | LIALSLGLTPNFKSNFDLAEDAKLQLSKDT |
| | | YDDDLDNLLAQIGDQYADLFLAAKNLSDAI |
| | | LLSDILRVNTEITKAPLSASMIKRYDEHHQ |
| | | DLTLLKALVRQQLPEKYKEIFFDQSKNGYA |
| | | GYIDGGASQEEFYKFIKPILEKMDGTEELL |
| | | VKLNREDLLRKQRTFDNGSIPHQIHLGELH |
| | | AILRRQEDFYPFLKDNREKIEKILTFRIPY |
| | | YVGPLARGNSRFAWMTRKSEETITPWNFEE |
| | | VVDKGASAQSFIERMTNFDKNLPNEKVLPK |
| | | HSLLYEYFTVYNELTKVKYVTEGMRKPAFL |
| | | SGEQKKAIVDLLFKTNRKVTVKQLKEDYFK |
| | | KIECFDSVEISGVEDRFNASLGTYHDLLKI |
| | | IKDKDFLDNEENEDILEDIVLTLTLFEDRE |
| | | MIEERLKTYAHLFDDKVMKQLKRRRYTGWG |
| | | RLSRKLINGIRDKQSGKTILDFLKSDGFAN |
| | | RNFMQLIHDDSLTFKEDIQKAQVSGQGDSL |
| | | HEHIANLAGSPAIKKGILQTVKVVDELVKV |
| | | MGRHKPENIVIEMARENQTTQKGQKNSRER |
| | | MKRIEEGIKELGSQILKEHPVENTQLQNEK |
| | | LYLYYLQNGRDMYVDQELDINRLSDYDVDA |
| | | IVPQSFLKDDSIDNKVLTRSDKNRGKSDNV |
| | | PSEEVVKKMKNYWRQLLNAKLITQRKFDNL |
| | | TKAERGGLSELDKAGFIKRQLVETRQITKH |
| | | VAQILDSRMNTKYDENDKLIREVKVITLKS |
| | | KLVSDFRKDFQFYKVREINNYHHAHDAYLN |
| | | AWGTALIKKYPKLESEFVYGDYKVYDVRKM |
| | | IAKSEQEIGKATAKYFFYSNIMNFFKTEIT |
| | | LANGEIRKRPLIETNGETGEIVWDKGRDFA |
| | | TVRKVLSMPQVNIVKKTEVQTGGFSKESIL |
| | | PKRNSDKLIARKKDWDPKKYGGFDSPTVAY |
| | | SVLVVAKVEKGKSKKLKSVKELLGITIMER |
| | | SSFEKNPIDFLEAKGYKEVKKDLIIKLPKY |
| | | SLFELENGRKRMLASAGELQKGNELALPSK |
| | | YVNFLYLASHYEKLKGSPEDNEQKQLFVEQ |
| | | HKHYLDEIIEQISEFSKRVILADANLDKVL |
| | | SAYNKHRDKPIREQAENIIHLFTLTNLGAP |
| | | AAFKYFDTTIDRKRYTSTKEVLDATLIHQS |
| | | ITGLYETRIDLSQLGGD |
| tr\|F0NN87\| | 239 | MEVPLYNIFGDNYIIQVATEAENSTIYNNK |
| F0NN87_ | | VEIDDEELRNVLNLAYKIAKNNEDAAAERR |
| SULIHCRISPR- | | GKAKKKKGEEGETTTSNIILPLSGNDKNPW |
| associated | | TETLKCYNFPTTVALSEVFKNFSQVKECEE |
| Casx protein | | VSAPSFVKPEFYEFGRSPGMVERTRRVKLE |
| OS = | | VEPHYLIIAAAGWVLTRLGKAKVSEGDYVG |
| Sulfolobus | | VNVFTPTRGILYSLIQNVNGIVPGIKPETA |
| islandicus | | FGLWIARKWSSVTNPNVSVVRIYTISDAVG |
| (strain | | QNPTTINGGFSIDLTKLLEKRYLLSERLEA |
| HVE10/4) | | IARNALSISSNMRERYIVLANYIYEYLTG |
| GN = | | SKRLEDLLYFANRDLIMNLNSDDGKVRDLK |
| SiH 0402 | | LISAYVNGELIRGEG |
| PE = 4 | | |
| SV = 1); | | |
| CasX | | |
| polypeptide | | |
| sequence | | |
| tr\|F0NH53\| | 240 | MEVPLYNIFGDNYIIQVATEAENSTIYNNK |
| F0NH53_ | | VEIDDEELRNVLNLAYKIAKNNEDAAAERR |
| SULIR | | GKAKKKKGEEGETTTSNIILPLSGNDKNPW |
| CRISPR | | TETLKCYNFPTTVALSEVFKNFSQVKECEE |
| associated | | VSAPSFVKPEFYKFGRSPGMVERTRRVKLE |
| protein, | | VEPHYLIMAAAGWVLTRLGKAKVSEGDYVG |
| Casx OS = | | VNVFTPTRGILYSLIQNVNGIVPGIKPETA |
| Sulfolobus | | FGLWIARKVVSSVTNPNVSVVSIYTISDAV |
| islandicus | | GQNPTTINGGFSIDLTKLLEKRDLLSERLE |
| (strain | | AIARNALSISSNMRERYIVLANYIYEYLTG |
| REY15A) | | SKRLEDLLYFANRDLIMNLNSDDGKVRDLK |
| GN = SiRe | | LISAYVNGELIRGEG |
| 0771 | | |
| PE = 4 | | |
| SV = 1); | | |
| CasX | | |
| polypeptide | | |
| sequence | | |
| CasX | 241 | MEKRINKIRKKLSADNATKPVSRSGPMKTL |
| polypeptide | | LVRVMTDDLKKRLEKRRKKPEVMPQVISNN |
| sequence | | AANNLRMLLDDYTKMKEAILQVYWQEFKDD |
| | | HVGLMCKFAQPASKKIDQNKLKPEMDEKGN |
| | | LTTAGFACSQCGQPLFVYKLEQVSEKGKAY |
| | | TNYFGRCNVAEHEKLILLAQLKPVKDSDEA |
| | | VTYSLGKFGQRALDFYSIHVTKESTHPVKP |
| | | LAQIAGNRYASGPVGKALSDACMGTIASFL |
| | | SKYQDIIIEHQKVVKGNQKRLESLRELAGK |
| | | ENLEYPSVTLPPQPHTKEGVDFAYNEVIAR |
| | | VRMWVNLNLWQKLKLSRDDAKPLLRLKGFP |
| | | SFPVVERRENEVDWWNTINEVKKLIDAKRD |
| | | MGRVFWSGVTAEKRNTILEGYNYLPNENDH |
| | | KKREGSLENPKKPAKRQFGDLLLYLEKKYA |
| | | GDWGKVFDEAWERIDKKIAGLTSHIEREEA |
| | | RNAEDAQSKAVLTDWLRAKASFVLERLKEM |
| | | DEKEFYACEIQLQKWYGDLRGNPFAVEAEN |
| | | RVVDISGFSIGSDGHSIQYRNLLAWKYLEN |
| | | GKREFYLLMNYGKKGRIRFTDGTDIKKSGK |
| | | WQGLLYGGGKAKVIDLTFDPDDEQLIILPL |
| | | AFGTRQGREFIWNDLLSLETGLIKLANGRV |
| | | IEKTIYNKKIGRDEPALFVALTFERREWDP |
| | | SNIKPVNLIGVARGENIPAVIALTDPEGCP |
| | | LPEFKDSSGGPTDILRIGEGYKEKQRAIQA |
| | | AKEVEQRRAGGYSRKFASKSRNLADDMVRN |
| | | SARDLFYHAVTHDAVLVFANLSRGFGRQGK |
| | | RTFMTERQYTKMEDWLTAKLAYEGLTSKTY |
| | | LSKTLAQYTSKTCSNCGFTITYADMDVMLV |
| | | RLKKTSDGWATTLNNKELKAEYQITYYNRY |
| | | KRQTVEKELSAELDRLSEESGNNDISKWTK |
| | | GRRDEALFLLKKRFSHRPVQEQFVCLDCGH |
| | | EVHAAEQAALNIARSWLFLNSNSTEFKSYK |
| | | SGKQPFVGAWQAFYKRRLKEVWKPNA |
| APG80656.1 | 242 | MSKRHPRISGVKGYRLHAQRLEYTGKSGAM |
| CRISPR- | | RTIKYPLYSSPSGGRTVPREIVSAINDDYV |
| associated | | GLYGLSNFDDLYNAEKRNEEKVYSVLDFWY |
| protein | | DCVQYGAVFSYTAPGLLKNVAEVRGGSYEL |
| CasY | | TKTLKGSHLYDELQIDKVIKFLNKKEISRA |
| [uncultured | | NGSLDKLKKDIIDCFKAEYRERHKDQCNKL |
| Parcubacteria | | ADDIKNAKKDAGASLGERQKKLFRDFFGIS |
| group | | EQSENDKPSFTNPLNLTCCLLPFDTVNNNR |
| Bacterium]; | | NRGEVLFNKLKEYAQKLDKNEGSLEMWEYI |
| CasY | | GIGNSGTAFSNFLGEGFLGRLRENKITELK |
| polypeptide | | KAMMDITDAWRGQEQEEELEKRLRILAALT |
| sequence | | IKLREPKFDNHWGGYRSDINGKLSSWLQNY |
| | | INQTVKIKEDLKGHKKDLKKAKEMINRFGE |
| | | SDTKEEAWSSLLESIEKIVPDDSADDEKPD |
| | | IPAIAIYRRFLSDGRLTLNRFVQREDVQEA |
| | | LIKERLEAEKKKKPKKRKKKSDAEDEKETI |
| | | DFKELFPHLAKPLKLVPNFYGDSKRELYKK |
| | | YKNAAIYTDALWKAVEKIYKSAFSSSLKNS |
| | | FFDTDFDKDFFIKRLQKIFSVYRRFNTDKW |
| | | KPIVKNSFAPYCDIVSLAENEVLYKPKQSR |
| | | SRKSAAIDKNRVRLPSTENIAKAGIALARE |
| | | LSVAGFDWKDLLKKEEHEEYIDLIELHKTA |
| | | LALLLAVTETQLDISALDFVENGTVKDFMK |
| | | TRDGNLVLEGRFLEMFSQSIVFSELRGLAG |
| | | LMSRKEFITRSAIQTMNGKQAELLYIPHEF |
| | | QSAKITTPKEMSRAFLDLAPAEFATSLEPE |
| | | SLSEKSLLKLKQMRYYPHYFGYELTRTGQG |
| | | IDGGVAENALRLEKSPVKKREIKCKQYKTL |
| | | GRGQNKIVLYVRSSYYQTQFLEWFLHRPKN |
| | | VQTDVAVSGSFLIDEKKVKTRWNYDALTVA |
| | | LEPVSGSERVFVSQPFTIFPEKSAEEEGQR |
| | | YLGIDIGEYGIAYTALEITGDSAKILDQNF |
| | | ISDPQLKTLREEVKGLKLDQRRGTFAMPST |
| | | KIARIRESLVHSLRNRIHHLALKHKAKIVY |
| | | ELEVSRFEEGKQKIKKVYATLKKADVYSEI |
| | | DADKNLQTTVWGKLAVASEISASYTSQFCG |
| | | ACKKLWRAEMQVDETITTQELIGTVRVIKG |
| | | GTLIDAIKDFMRPPIFDENDTPFPKYRDFC |
| | | DKHHISKKMRGNSCLFICPFCRANADADIQ |
| | | ASQTIALLRYVKEEKKVEDYFERFRKLKNI |
| | | KVLGQMKKI |
| wild type | 246 | MSIYQEFVNKYSLSKTLRFELIPQGKTLEN |
| Cpf1 | | IKARGLILDDEKRAKDYKKAKQIIDKYHQF |
| polypeptide | | FIEEILSSVCISEDLLQNYSDVYFKLKKSD |
| sequence | | DDNLQKDFKSAKDTIKKQISEYIKDSEKFK |
| | | NLFNQNLIDAKKGQESDLILWLKQSKDNGI |
| | | ELFKANSDITDIDEALEIIKSFKGWTTYFK |
| | | GFHENRKNVYSSNDIPTSIIYRIVDDNLPK |
| | | FLENKAKYESLKDKAPEAINYEQIKKDLAE |
| | | ELTFDIDYKTSEVNQRVFSLDEVFEIANFN |
| | | NYLNQSGITKFNTIIGGKFVNGENTKRKGI |
| | | NEYINLYSQQINDKTLKKYKMSVLFKQILS |
| | | DTESKSFVIDKLEDDSDVVTTMQSFYEQIA |
| | | AFKTVEEKSIKETLSLLFDDLKAQKLDLSK |
| | | IYFKNDKSLTDLSQQVFDDYSVIGTAVLEY |
| | | ITQQIAPKNLDNPSKKEQELIAKKTEKAKY |
| | | LSLETIKLALEEFNKHRDIDKQCRFEEILA |
| | | NFAAIPMIFDEIAQNKDNLAQISIKYQNQG |
| | | KKDLLQASAEDDVKAIKDLLDQTNNLLHKL |
| | | KIFHISQSEDKANILDKDEHFYLVFEECYF |
| | | ELANIVPLYNKIRNYITQKPYSDEKFKLNF |
| | | ENSTLANGWDKNKEPDNTAILFIKDDKYYL |
| | | GVMNKKNNKIFDDKAIKENKGEGYKKIVYK |
| | | LLPGANKMLPKVFFSAKSIKFYNPSEDILR |
| | | IRNHSTHTKNGSPQKGYEKFEFNIEDCRKF |
| | | IDFYKQSISKHPEWKDFGFRFSDTQRYNSI |
| | | DEFYREVENQGYKLTFENISESYIDSVVNQ |
| | | GKLYLFQIYNKDFSAYSKGRPNLHTLYWKA |
| | | LFDERNLQDWYKLNGEAELFYRKQSIPKKI |
| | | THPAKEAIANKNKDNPKKESVFEYDLIKDK |
| | | RFTEDKFFFHCPITINFKSSGANKFNDEIN |
| | | LLLKEKANDVHILSIDRGERHLAYYTLVDG |
| | | KGNIIKQDTFNIIGNDRMKTNYHDKLAAIE |
| | | KDRDSARKDWKKINNIKEMKEGYLSQVVHE |
| | | IAKLVIEYNAIVVFEDLNFGFKRGRFKVEK |
| | | QVYQKLEKMLIEKLNYLVFKDNEFDKTGGV |
| | | LRAYQLTAPFETFKKMGKQTGIIYYVPAGF |
| | | TSKICPVTGFVNQLYPKYESVSKSQEFFSK |
| | | FDKICYNLDKGYFEFSFDYKNFGDKAAKGK |
| | | WTIASFGSRLINFRNSDKNHNWDTREVYPT |
| | | KELEKLLKDYSIEYGHGECIKAAICGESDK |
| | | KFFAKLTSVLNTILQMRNSKTGTELDYLIS |
| | | PVADVNGNFFDSRQAPKNMPQDADANGAYH |
| | | IGLKGLMLLGRIKNNQEGKKLNLVIKNEEY |
| | | FEFVQNRNN |
| Cpf1 D917A | 247 | MSIYQEFVNKYSLSKTLRFELIPQGKTLEN |
| polypeptide | | IKARGLILDDEKRAKDYKKAKQIIDKYHQF |
| sequence | | FIEEILSSVCISEDLLQNYSDVYFKLKKSD |
| | | DDNLQKDFKSAKDTIKKQISEYIKDSEKFK |
| | | NLFNQNLIDAKKGQESDLILWLKQSKDNGI |
| | | ELFKANSDITDIDEALEIIKSFKGWTTYFK |
| | | GFHENRKNVYSSNDIPTSIIYRIVDDNLPK |
| | | FLENKAKYESLKDKAPEAINYEQIKKDLAE |
| | | ELTFDIDYKTSEVNQRVFSLDEVFEIANFN |
| | | NYLNQSGITKFNTIIGGKFVNGENTKRKGI |
| | | NEYINLYSQQINDKTLKKYKMSVLFKQILS |
| | | DTESKSFVIDKLEDDSDWTTMQSFYEQIAA |
| | | FKTVEEKSIKETLSLLFDDLKAQKLDLSKI |
| | | YFKNDKSLTDLSQQVFDDYSVIGTAVLEYI |
| | | TQQIAPKNLDNPSKKEQELIAKKTEKAKYL |
| | | SLETIKLALEEFNKHRDIDKQCRFEEILAN |
| | | FAAIPMIFDEIAQNKDNLAQISIKYQNQGK |
| | | KDLLQASAEDDVKAIKDLLDQTNNLLHKLK |
| | | IFHISQSEDKANILDKDEHFYLVFEECYFE |
| | | LANIVPLYNKIRNYITQKPYSDEKFKLNFE |
| | | NSTLANGWDKNKEPDNTAILFIKDDKYYLG |
| | | VMNKKNNKIFDDKAIKENKGEGYKKIVYKL |
| | | LPGANKMLPKVFFSAKSIKFYNPSEDILRI |
| | | RNHSTHTKNGSPQKGYEKFEFNIEDCRKFI |
| | | DFYKQSISKHPEWKDFGFRFSDTQRYNSID |
| | | EFYREVENQGYKLTFENISESYIDSVVNQG |
| | | KLYLFQIYNKDFSAYSKGRPNLHTLYWKAL |
| | | FDERNLQDWYKLNGEAELFYRKQSIPKKIT |
| | | HPAKEAIANKNKDNPKKESVFEYDLIKDKR |
| | | FTEDKFFFHCPITINFKSSGANKFNDEINL |
| | | LLKEKANDVHILSIARGERHLAYYTLVDGK |
| | | GNIIKQDTFNIIGNDRMKTNYHDKLAAIEK |
| | | DRDSARKDWKKINNIKEMKEGYLSQVVHEI |
| | | AKLVIEYNAIVVFEDLNFGFKRGRFKVEKQ |
| | | VYQKLEKMLIEKLNYLVFKDNEFDKTGGVL |
| | | RAYQLTAPFETFKKMGKQTGIIYYVPAGFT |
| | | SKICPVTGFVNQLYPKYESVSKSQEFFSKF |
| | | DKICYNLDKGYFEFSFDYKNFGDKAAKGKW |
| | | TIASFGSRLINFRNSDKNHNWDTREVYPTK |
| | | ELEKLLKDYSIEYGHGECIKAAICGESDKK |
| | | FFAKLTSVLNTILQMRNSKTGTELDYLISP |
| | | VADVNGNFFDSRQAPKNMPQDADANGAYHI |
| | | GLKGLMLLGRIKNNQEGKKLNLVIKNEEYF |
| | | EFVQNRNN |
| Cpf1 | 248 | MSIYQEFVNKYSLSKTLRFELIPQGKTLEN |
| E1006A | | IKARGLILDDEKRAKDYKKAKQIIDKYHQF |
| polypeptide | | FIEEILSSVCISEDLLQNYSDVYFKLKKSD |
| sequence | | DDNLQKDFKSAKDTIKKQISEYIKDSEKFK |
| | | NLFNQNLIDAKKGQESDLILWLKQSKDNGI |
| | | ELFKANSDITDIDEALEIIKSFKGWTTYFK |
| | | GFHENRKNVYSSNDIPTSIIYRIVDDNLPK |
| | | FLENKAKYESLKDKAPEAINYEQIKKDLAE |
| | | ELTFDIDYKTSEVNQRVFSLDEVFEIANFN |
| | | NYLNQSGITKFNTIIGGKFVNGENTKRKGI |
| | | NEYINLYSQQINDKTLKKYKMSVLFKQILS |
| | | DTESKSFVIDKLEDDSDVVTTMQSFYEQIA |
| | | AFKTVEEKSIKETLSLLFDDLKAQKLDLSK |
| | | IYFKNDKSLTDLSQQVFDDYSVIGTAVLEY |
| | | ITQQIAPKNLDNPSKKEQELIAKKTEKAKY |
| | | LSLETIKLALEEFNKHRDIDKQCRFEEILA |
| | | NFAAIPMIFDEIAQNKDNLAQISIKYQNQG |
| | | KKDLLQASAEDDVKAIKDLLDQTNNLLHKL |
| | | KIFHISQSEDKANILDKDEHFYLVFEECYF |
| | | ELANIVPLYNKIRNYITQKPYSDEKFKLNF |
| | | ENSTLANGWDKNKEPDNTAILFIKDDKYYL |
| | | GVMNKKNNKIFDDKAIKENKGEGYKKIVYK |
| | | LLPGANKMLPKVFFSAKSIKFYNPSEDILR |
| | | IRNHSTHTKNGSPQKGYEKFEFNIEDCRKF |
| | | IDFYKQSISKHPEWKDFGFRFSDTQRYNSI |
| | | DEFYREVENQGYKLTFENISESYIDSVVNQ |
| | | GKLYLFQIYNKDFSAYSKGRPNLHTLYWKA |
| | | LFDERNLQDWYKLNGEAELFYRKQSIPKKI |
| | | THPAKEAIANKNKDNPKKESVFEYDLIKDK |
| | | RFTEDKFFFHCPITINFKSSGANKFNDEIN |
| | | LLLKEKANDVHILSIDRGERHLAYYTLVDG |
| | | KGNIIKQDTFNIIGNDRMKTNYHDKLAAIE |
| | | KDRDSARKDWKKINNIKEMKEGYLSQVVHE |
| | | IAKLVIEYNAIVVFADLNFGFKRGRFKVEK |
| | | QVYQKLEKMLIEKLNYLVFKDNEFDKTGGV |
| | | LRAYQLTAPFETFKKMGKQTGIIYYVPAGF |
| | | TSKICPVTGFVNQLYPKYESVSKSQEFFSK |
| | | FDKICYNLDKGYFEFSFDYKNFGDKAAKGK |
| | | WTIASFGSRLINFRNSDKNHNWDTREVYPT |
| | | KELEKLLKDYSIEYGHGECIKAAICGESDK |
| | | KFFAKLTSVLNTILQMRNSKTGTELDYLIS |
| | | PVADVNGNFFDSRQAPKNMPQDADANGAYH |
| | | IGLKGLMLLGRIKNNQEGKKLNLVIKNEEY |
| | | FEFVQNRNN |
| Cpf1 | 249 | MSIYQEFVNKYSLSKTLRFELIPQGKTLEN |
| D1255A | | IKARGLILDDEKRAKDYKKAKQIIDKYHQF |
| polypeptide | | FIEEILSSVCISEDLLQNYSDVYFKLKKSD |
| sequence | | DDNLQKDFKSAKDTIKKQISEYIKDSEKFK |
| | | NLFNQNLIDAKKGQESDLILWLKQSKDNGI |
| | | ELFKANSDITDIDEALEIIKSFKGWTTYFK |
| | | GFHENRKNVYSSNDIPTSIIYRIVDDNLPK |
| | | FLENKAKYESLKDKAPEAINYEQIKKDLAE |
| | | ELTFDIDYKTSEVNQRVFSLDEVFEIANFN |
| | | NYLNQSGITKFNTIIGGKFVNGENTKRKGI |
| | | NEYINLYSQQINDKTLKKYKMSVLFKQILS |
| | | DTESKSFVIDKLEDDSDWTTMQSFYEQIAA |
| | | FKTVEEKSIKETLSLLFDDLKAQKLDLSKI |
| | | YFKNDKSLTDLSQQVFDDYSVIGTAVLEYI |
| | | TQQIAPKNLDNPSKKEQELIAKKTEKAKYL |
| | | SLETIKLALEEFNKHRDIDKQCRFEEILAN |
| | | FAAIPMIFDEIAQNKDNLAQISIKYQNQGK |
| | | KDLLQASAEDDVKAIKDLLDQTNNLLHKLK |
| | | IFHISQSEDKANILDKDEHFYLVFEECYFE |
| | | LANIVPLYNKIRNYITQKPYSDEKFKLNFE |
| | | NSTLANGWDKNKEPDNTAILFIKDDKYYLG |
| | | VMNKKNNKIFDDKAIKENKGEGYKKIVYKL |
| | | LPGANKMLPKVFFSAKSIKFYNPSEDILRI |
| | | RNHSTHTKNGSPQKGYEKFEFNIEDCRKFI |
| | | DFYKQSISKHPEWKDFGFRFSDTQRYNSID |
| | | EFYREVENQGYKLTFENISESYIDSVVNQG |
| | | KLYLFQIYNKDFSAYSKGRPNLHTLYWKAL |
| | | FDERNLQDWYKLNGEAELFYRKQSIPKKIT |
| | | HPAKEAIANKNKDNPKKESVFEYDLIKDKR |
| | | FTEDKFFFHCPITINFKSSGANKFNDEINL |
| | | LLKEKANDVHILSIDRGERHLAYYTLVDGK |
| | | GNIIKQDTFNIIGNDRMKTNYHDKLAAIEK |
| | | DRDSARKDWKKINNIKEMKEGYLSQWHEIA |
| | | KLVIEYNAIVVFEDLNFGFKRGRFKVEKQV |
| | | YQKLEKMLIEKLNYLVFKDNEFDKTGGVLR |
| | | AYQLTAPFETFKKMGKQTGIIYYVPAGFTS |
| | | KICPVTGFVNQLYPKYESVSKSQEFFSKFD |
| | | KICYNLDKGYFEFSFDYKNFGDKAAKGKWT |
| | | IASFGSRLINFRNSDKNHNWDTREVYPTKE |
| | | LEKLLKDYSIEYGHGECIKAAICGESDKKF |
| | | FAKLTSVLNTILQMRNSKTGTELDYLISPV |
| | | ADVNGNFFDSRQAPKNMPQDAAANGAYHIG |
| | | LKGLMLLGRIKNNQEGKKLNLVIKNEEYFE |
| | | FVQNRNN |
| Cpf1 | 250 | MSIYQEFVNKYSLSKTLRFELIPQGKTLEN |
| D917A/ | | IKARGLILDDEKRAKDYKKAKQIIDKYHQF |
| E1006A | | FIEEILSSVCISEDLLQNYSDVYFKLKKSD |
| polypeptide | | DDNLQKDFKSAKDTIKKQISEYIKDSEKFK |
| sequence | | NLFNQNLIDAKKGQESDLILWLKQSKDNGI |
| | | ELFKANSDITDIDEALEIIKSFKGWTTYFK |
| | | GFHENRKNVYSSNDIPTSIIYRIVDDNLPK |
| | | FLENKAKYESLKDKAPEAINYEQIKKDLAE |
| | | ELTFDIDYKTSEVNQRVFSLDEVFEIANFN |
| | | NYLNQSGITKFNTIIGGKFVNGENTKRKGI |
| | | NEYINLYSQQINDKTLKKYKMSVLFKQILS |
| | | DTESKSFVIDKLEDDSDVVTTMQSFYEQIA |
| | | AFKTVEEKSIKETLSLLFDDLKAQKLDLSK |
| | | IYFKNDKSLTDLSQQVFDDYSVIGTAVLEY |
| | | ITQQIAPKNLDNPSKKEQELIAKKTEKAKY |
| | | LSLETIKLALEEFNKHRDIDKQCRFEEILA |
| | | NFAAIPMIFDEIAQNKDNLAQISIKYQNQG |
| | | KKDLLQASAEDDVKAIKDLLDQTNNLLHKL |
| | | KIFHISQSEDKANILDKDEHFYLVFEECYF |
| | | ELANIVPLYNKIRNYITQKPYSDEKFKLNF |
| | | ENSTLANGWDKNKEPDNTAILFIKDDKYYL |
| | | GVMNKKNNKIFDDKAIKENKGEGYKKIVYK |
| | | LLPGANKMLPKVFFSAKSIKFYNPSEDILR |
| | | IRNHSTHTKNGSPQKGYEKFEFNIEDCRKF |
| | | IDFYKQSISKHPEWKDFGFRFSDTQRYNSI |
| | | DEFYREVENQGYKLTFENISESYIDSVVNQ |
| | | GKLYLFQIYNKDFSAYSKGRPNLHTLYWKA |
| | | LFDERNLQDVVYKLNGEAELFYRKQSIPKK |
| | | ITHPAKEAIANKNKDNPKKESVFEYDLIKD |
| | | KRFTEDKFFFHCPITINFKSSGANKFNDEI |
| | | NLLLKEKANDVHILSIARGERHLAYYTLVD |
| | | GKGNIIKQDTFNIIGNDRMKTNYHDKLAAI |
| | | EKDRDSARKDWKKINNIKEMKEGYLSQVVH |
| | | EIAKLVIEYNAIVVFADLNFGFKRGRFKVE |
| | | KQVYQKLEKMLIEKLNYLVFKDNEFDKTGG |
| | | VLRAYQLTAPFETFKKMGKQTGIIYYVPAG |
| | | FTSKICPVTGFVNQLYPKYESVSKSQEFFS |
| | | KFDKICYNLDKGYFEFSFDYKNFGDKAAKG |
| | | KWTIASFGSRLINFRNSDKNHNWDTREVYP |
| | | TKELEKLLKDYSIEYGHGECIKAAICGESD |
| | | KKFFAKLTSVLNTILQMRNSKTGTELDYLI |
| | | SPVADVNGNFFDSRQAPKNMPQDADANGAY |
| | | HIGLKGLMLLGRIKNNQEGKKLNLVIKNEE |
| | | YFEFVQNRNN |
| Cpf1 | 251 | MSIYQEFVNKYSLSKTLRFELIPQGKTLEN |
| D917A/ | | IKARGLILDDEKRAKDYKKAKQIIDKYHQF |
| D1255A | | FIEEILSSVCISEDLLQNYSDVYFKLKKSD |
| polypeptide | | DDNLQKDFKSAKDTIKKQISEYIKDSEKFK |
| sequence | | NLFNQNLIDAKKGQESDLILWLKQSKDNGI |
| | | ELFKANSDITDIDEALEIIKSFKGWTTYFK |
| | | GFHENRKNVYSSNDIPTSIIYRIVDDNLPK |
| | | FLENKAKYESLKDKAPEAINYEQIKKDLAE |
| | | ELTFDIDYKTSEVNQRVFSLDEVFEIANFN |
| | | NYLNQSGITKFNTIIGGKFVNGENTKRKGI |
| | | NEYINLYSQQINDKTLKKYKMSVLFKQILS |
| | | DTESKSFVIDKLEDDSDWTTMQSFYEQIAA |
| | | FKTVEEKSIKETLSLLFDDLKAQKLDLSKI |
| | | YFKNDKSLTDLSQQVFDDYSVIGTAVLEYI |
| | | TQQIAPKNLDNPSKKEQELIAKKTEKAKYL |
| | | SLETIKLALEEFNKHRDIDKQCRFEEILAN |
| | | FAAIPMIFDEIAQNKDNLAQISIKYQNQGK |
| | | KDLLQASAEDDVKAIKDLLDQTNNLLHKLK |
| | | IFHISQSEDKANILDKDEHFYLVFEECYFE |
| | | LANIVPLYNKIRNYITQKPYSDEKFKLNFE |
| | | NSTLANGWDKNKEPDNTAILFIKDDKYYLG |
| | | VMNKKNNKIFDDKAIKENKGEGYKKIVYKL |
| | | LPGANKMLPKVFFSAKSIKFYNPSEDILRI |
| | | RNHSTHTKNGSPQKGYEKFEFNIEDCRKFI |
| | | DFYKQSISKHPEWKDFGFRFSDTQRYNSID |
| | | EFYREVENQGYKLTFENISESYIDSVVNQG |
| | | KLYLFQIYNKDFSAYSKGRPNLHTLYWKAL |
| | | FDERNLQDVVYKLNGEAELFYRKQSIPKKI |
| | | THPAKEAIANKNKDNPKKESVFEYDLIKDK |
| | | RFTEDKFFFHCPITINFKSSGANKFNDEIN |
| | | LLLKEKANDVHILSIARGERHLAYYTLVDG |
| | | KGNIIKQDTFNIIGNDRMKTNYHDKLAAIE |
| | | KDRDSARKDWKKINNIKEMKEGYLSQVVHE |
| | | IAKLVIEYNAIVVFEDLNFGFKRGRFKVEK |
| | | QVYQKLEKMLIEKLNYLVFKDNEFDKTGGV |
| | | LRAYQLTAPFETFKKMGKQTGIIYYVPAGF |
| | | TSKICPVTGFVNQLYPKYESVSKSQEFFSK |
| | | FDKICYNLDKGYFEFSFDYKNFGDKAAKGK |
| | | WTIASFGSRLINFRNSDKNHNWDTREVYPT |
| | | KELEKLLKDYSIEYGHGECIKAAICGESDK |
| | | KFFAKLTSVLNTILQMRNSKTGTELDYLIS |
| | | PVADVNGNFFDSRQAPKNMPQDAAANGAYH |
| | | IGLKGLMLLGRIKNNQEGKKLNLVIKNEEY |
| | | FEFVQNRNN |
| Cpf1 | 252 | MSIYQEFVNKYSLSKTLRFELIPQGKTLEN |
| E1006A/ | | IKARGLILDDEKRAKDYKKAKQIIDKYHQF |
| D1255A | | FIEEILSSVCISEDLLQNYSDVYFKLKKSD |
| polypeptide | | DDNLQKDFKSAKDTIKKQISEYIKDSEKFK |
| sequence | | NLFNQNLIDAKKGQESDLILWLKQSKDNGI |
| | | ELFKANSDITDIDEALEIIKSFKGWTTYFK |
| | | GFHENRKNVYSSNDIPTSIIYRIVDDNLPK |
| | | FLENKAKYESLKDKAPEAINYEQIKKDLAE |
| | | ELTFDIDYKTSEVNQRVFSLDEVFEIANFN |
| | | NYLNQSGITKFNTIIGGKFVNGENTKRKGI |
| | | NEYINLYSQQINDKTLKKYKMSVLFKQILS |
| | | DTESKSFVIDKLEDDSDVVTTMQSFYEQIA |
| | | AFKTVEEKSIKETLSLLFDDLKAQKLDLSK |
| | | IYFKNDKSLTDLSQQVFDDYSVIGTAVLEY |
| | | ITQQIAPKNLDNPSKKEQELIAKKTEKAKY |
| | | LSLETIKLALEEFNKHRDIDKQCRFEEILA |
| | | NFAAIPMIFDEIAQNKDNLAQISIKYQNQG |
| | | KKDLLQASAEDDVKAIKDLLDQTNNLLHKL |
| | | KIFHISQSEDKANILDKDEHFYLVFEECYF |
| | | ELANIVPLYNKIRNYITQKPYSDEKFKLNF |
| | | ENSTLANGWDKNKEPDNTAILFIKDDKYYL |
| | | GVMNKKNNKIFDDKAIKENKGEGYKKIVYK |
| | | LLPGANKMLPKVFFSAKSIKFYNPSEDILR |
| | | IRNHSTHTKNGSPQKGYEKFEFNIEDCRKF |
| | | IDFYKQSISKHPEWKDFGFRFSDTQRYNSI |
| | | DEFYREVENQGYKLTFENISESYIDSVVNQ |
| | | GKLYLFQIYNKDFSAYSKGRPNLHTLYWKA |
| | | LFDERNLQDVVYKLNGEAELFYRKQSIPKK |
| | | ITHPAKEAIANKNKDNPKKESVFEYDLIKD |
| | | KRFTEDKFFFHCPITINFKSSGANKFNDEI |
| | | NLLLKEKANDVHILSIDRGERHLAYYTLVD |
| | | GKGNIIKQDTFNIIGNDRMKTNYHDKLAAI |
| | | EKDRDSARKDWKKINNIKEMKEGYLSQVVH |
| | | EIAKLVIEYNAIVVFADLNFGFKRGRFKVE |
| | | KQVYQKLEKMLIEKLNYLVFKDNEFDKTGG |
| | | VLRAYQLTAPFETFKKMGKQTGIIYYVPAG |
| | | FTSKICPVTGFVNQLYPKYESVSKSQEFFS |
| | | KFDKICYNLDKGYFEFSFDYKNFGDKAAKG |
| | | KWTIASFGSRLINFRNSDKNHNWDTREVYP |
| | | TKELEKLLKDYSIEYGHGECIKAAICGESD |
| | | KKFFAKLTSVLNTILQMRNSKTGTELDYLI |
| | | SPVADVNGNFFDSRQAPKNMPQDAAANGAY |
| | | HIGLKGLMLLGRIKNNQEGKKLNLVIKNEE |
| | | YFEFVQNRNN |
| Cpf1 | 253 | MSIYQEFVNKYSLSKTLRFELIPQGKTLEN |
| D917A/ | | IKARGLILDDEKRAKDYKKAKQIIDKYHQF |
| E1006A/ | | FIEEILSSVCISEDLLQNYSDVYFKLKKSD |
| D1255A | | DDNLQKDFKSAKDTIKKQISEYIKDSEKFK |
| polypeptide | | NLFNQNLIDAKKGQESDLILWLKQSKDNGI |
| sequence | | ELFKANSDITDIDEALEIIKSFKGWTTYFK |
| | | GFHENRKNVYSSNDIPTSIIYRIVDDNLPK |
| | | FLENKAKYESLKDKAPEAINYEQIKKDLAE |
| | | ELTFDIDYKTSEVNQRVFSLDEVFEIANFN |
| | | NYLNQSGITKFNTIIGGKFVNGENTKRKGI |
| | | NEYINLYSQQINDKTLKKYKMSVLFKQILS |
| | | DTESKSFVIDKLEDDSDWTTMQSFYEQIAA |
| | | FKTVEEKSIKETLSLLFDDLKAQKLDLSKI |
| | | YFKNDKSLTDLSQQVFDDYSVIGTAVLEYI |
| | | TQQIAPKNLDNPSKKEQELIAKKTEKAKYL |
| | | SLETIKLALEEFNKHRDIDKQCRFEEILAN |
| | | FAAIPMIFDEIAQNKDNLAQISIKYQNQGK |
| | | KDLLQASAEDDVKAIKDLLDQTNNLLHKLK |
| | | IFHISQSEDKANILDKDEHFYLVFEECYFE |
| | | LANIVPLYNKIRNYITQKPYSDEKFKLNFE |
| | | NSTLANGWDKNKEPDNTAILFIKDDKYYLG |
| | | VMNKKNNKIFDDKAIKENKGEGYKKIVYKL |
| | | LPGANKMLPKVFFSAKSIKFYNPSEDILRI |
| | | RNHSTHTKNGSPQKGYEKFEFNIEDCRKFI |
| | | DFYKQSISKHPEWKDFGFRFSDTQRYNSID |
| | | EFYREVENQGYKLTFENISESYIDSVVNQG |
| | | KLYLFQIYNKDFSAYSKGRPNLHTLYWKAL |
| | | FDERNLQDWYKLNGEAELFYRKQSIPKKIT |
| | | HPAKEAIANKNKDNPKKESVFEYDLIKDKR |
| | | FTEDKFFFHCPITINFKSSGANKFNDEINL |
| | | LLKEKANDVHILSIARGERHLAYYTLVDGK |
| | | GNIIKQDTFNIIGNDRMKTNYHDKLAAIEK |
| | | DRDSARKDWKKINNIKEMKEGYLSQVVHEI |
| | | AKLVIEYNAIVVFADLNFGFKRGRFKVEKQ |
| | | VYQKLEKMLIEKLNYLVFKDNEFDKTGGVL |
| | | RAYQLTAPFETFKKMGKQTGIIYYVPAGFT |
| | | SKICPVTGFVNQLYPKYESVSKSQEFFSKF |
| | | DKICYNLDKGYFEFSFDYKNFGDKAAKGKW |
| | | TIASFGSRLINFRNSDKNHNWDTREVYPTK |
| | | ELEKLLKDYSIEYGHGECIKAAICGESDKK |
| | | FFAKLTSVLNTILQMRNSKTGTELDYLISP |
| | | VADVNGNFFDSRQAPKNMPQDAAANGAYHI |
| | | GLKGLMLLGRIKNNQEGKKLNLVIKNEEYF |
| | | EFVQNRNN |
| synthetic | 254 | KRNYILGLDIGITSVGYGIIDYETRDVIDA |
| polypeptide | | GVRLFKEANVENNEGRRSKRGARRLKRRRR |
| | | HRIQRVKKLLFDYNLLTDHSELSGINPYEA |
| | | RVKGLSQKLSEEEFSAALLHLAKRRGVHNV |
| | | NEVEEDTGNELSTKEQISRNSKALEEKYVA |
| | | ELQLERLKKDGEVRGSINRFKTSDYVKEAK |
| | | QLLKVQKAYHQLDQSFIDTYIDLLETRRTY |
| | | YEGPGEGSPFGWKDIKEWYEMLMGHCTYFP |
| | | EELRSVKYAYNADLYNALNDLNNLVITRDE |
| | | NEKLEYYEKFQIIENVFKQKKKPTLKQIAK |
| | | EILVNEEDIKGYRVTSTGKPEFTNLKVYHD |
| | | IKDITARKEIIENAELLDQIAKILTIYQSS |
| | | EDIQEELTNLNSELTQEEIEQISNLKGYTG |
| | | THNLSLKAINLILDELWHTNDNQIAIFNRL |
| | | KLVPKKVDLSQQKEIPTTLVDDFILSPVVK |
| | | RSFIQSIKVINAIIKKYGLPNDIIIELARE |
| | | KNSKDAQKMINEMQKRNRQTNERIEEIIRT |
| | | TGKENAKYLIEKIKLHDMQEGKCLYSLEAI |
| | | PLEDLLNNPFNYEVDHIIPRSVSFDNSFNN |
| | | KVLVKQEENSKKGNRTPFQYLSSSDSKISY |
| | | ETFKKHILNLAKGKGRISKTKKEYLLEERD |
| | | INRFSVQKDFINRNLVDTRYATRGLMNLLR |
| | | SYFRVNNLDVKVKSINGGFTSFLRRKWKFK |
| | | KERNKGYKHHAEDALIIANADFIFKEWKKL |
| | | DKAKKVMENQMFEEKQAESMPEIETEQEYK |
| | | EIFITPHQIKHIKDFKDYKYSHRVDKKPNR |
| | | ELINDTLYSTRKDDKGNTLIVNNLNGLYDK |
| | | DNDKLKKLINKSPEKLLMYHHDPQTYQKLK |
| | | LIMEQYGDEKNPLYKYYEETGNYLTKYSKK |
| | | DNGPVIKKIKYYGNKLNAHLDITDDYPNSR |
| | | NKVVKLSLKPYRFDVYLDNGVYKFVTVKNL |
| | | DVIKKENYYEVNSKCYEEAKKLKKISNQAE |
| | | FIASFYNNDLIKINGELYRVIGVNNDLLNR |
| | | IEVNMIDITYREYLENMNDKRPPRIIKTIA |
| | | SKTQSIKKYSTDILGNLYEVKSKKHPQIIK |
| | | KG |
| SaCas9n | 255 | KRNYILGLDIGITSVGYGIIDYETRDVIDA |
| polypeptide | | GVRLFKEANVENNEGRRSKRGARRLKRRRR |
| sequence | | HRIQRVKKLLFDYNLLTDHSELSGINPYEA |
| | | RVKGLSQKLSEEEFSAALLHLAKRRGVHNV |
| | | NEVEEDTGNELSTKEQISRNSKALEEKYVA |
| | | ELQLERLKKDGEVRGSINRFKTSDYVKEAK |
| | | QLLKVQKAYHQLDQSFIDTYIDLLETRRTY |
| | | YEGPGEGSPFGWKDIKEWYEMLMGHCTYFP |
| | | EELRSVKYAYNADLYNALNDLNNLVITRDE |
| | | NEKLEYYEKFQIIENVFKQKKKPTLKQIAK |
| | | EILVNEEDIKGYRVTSTGKPEFTNLKVYHD |
| | | IKDITARKEIIENAELLDQIAKILTIYQSS |
| | | EDIQEELTNLNSELTQEEIEQISNLKGYTG |
| | | THNLSLKAINLILDELWHTNDNQIAIFNRL |
| | | KLVPKKVDLSQQKEIPTTLVDDFILSPWKR |
| | | SFIQSIKVINAIIKKYGLPNDIIIELAREK |
| | | NSKDAQKMINEMQKRNRQTNERIEEIIRTT |
| | | GKENAKYLIEKIKLHDMQEGKCLYSLEAIP |
| | | LEDLLNNPFNYEVDHIIPRSVSFDNSFNNK |
| | | VLVKQEEASKKGNRTPFQYLSSSDSKISYE |
| | | TFKKHILNLAKGKGRISKTKKEYLLEERDI |
| | | NRFSVQKDFINRNLVDTRYATRGLMNLLRS |
| | | YFRVNNLDVKVKSINGGFTSFLRRKWKFKK |
| | | ERNKGYKHHAEDALIIANADFIFKEWKKLD |
| | | KAKKVMENQMFEEKQAESMPEIETEQEYKE |
| | | IFITPHQIKHIKDFKDYKYSHRVDKKPNRE |
| | | LINDTLYSTRKDDKGNTLIVNNLNGLYDKD |
| | | NDKLKKLINKSPEKLLMYHHDPQTYQKLKL |
| | | IMEQYGDEKNPLYKYYEETGNYLTKYSKKD |
| | | NGPVIKKIKYYGNKLNAHLDITDDYPNSRN |
| | | KVVKLSLKPYRFDVYLDNGVYKFVTVKNLD |
| | | VIKKENYYEVNSKCYEEAKKLKKISNQAEF |
| | | IASFYNNDLIKINGELYRVIGVNNDLLNRI |
| | | EVNMIDITYREYLENMNDKRPPRIIKTIAS |
| | | KTQSIKKYSTDILGNLYEVKSKKHPQIIKK |
| | | G |
| SaKKH | 256 | KRNYILGLDIGITSVGYGIIDYETRDVIDA |
| Cas9 | | GVRLFKEANVENNEGRRSKRGARRLKRRRR |
| polypeptide | | HRIQRVKKLLFDYNLLTDHSELSGINPYEA |
| sequence | | RVKGLSQKLSEEEFSAALLHLAKRRGVHNV |
| | | NEVEEDTGNELSTKEQISRNSKALEEKYVA |
| | | ELQLERLKKDGEVRGSINRFKTSDYVKEAK |
| | | QLLKVQKAYHQLDQSFIDTYIDLLETRRTY |
| | | YEGPGEGSPFGWKDIKEWYEMLMGHCTYFP |
| | | EELRSVKYAYNADLYNALNDLNNLVITRDE |
| | | NEKLEYYEKFQIIENVFKQKKKPTLKQIAK |
| | | EILVNEEDIKGYRVTSTGKPEFTNLKVYHD |
| | | IKDITARKEIIENAELLDQIAKILTIYQSS |
| | | EDIQEELTNLNSELTQEEIEQISNLKGYTG |
| | | THNLSLKAINLILDELWHTNDNQIAIFNRL |
| | | KLVPKKVDLSQQKEIPTTLVDDFILSPVVK |
| | | RSFIQSIKVINAIIKKYGLPNDIIIELARE |
| | | KNSKDAQKMINEMQKRNRQTNERIEEIIRT |
| | | TGKENAKYLIEKIKLHDMQEGKCLYSLEAI |
| | | PLEDLLNNPFNYEVDHIIPRSVSFDNSFNN |
| | | KVLVKQEEASKKGNRTPFQYLSSSDSKISY |
| | | ETFKKHILNLAKGKGRISKTKKEYLLEERD |
| | | INRFSVQKDFINRNLVDTRYATRGLMNLLR |
| | | SYFRVNNLDVKVKSINGGFTSFLRRKWKFK |
| | | KERNKGYKHHAEDALIIANADFIFKEWKKL |
| | | DKAKKVMENQMFEEKQAESMPEIETEQEYK |
| | | EIFITPHQIKHIKDFKDYKYSHRVDKKPNR |
| | | KLINDTLYSTRKDDKGNTLIVNNLNGLYDK |
| | | DNDKLKKLINKSPEKLLMYHHDPQTYQKLK |
| | | LIMEQYGDEKNPLYKYYEETGNYLTKYSKK |
| | | DNGPVIKKIKYYGNKLNAHLDITDDYPNSR |
| | | NKVVKLSLKPYRFDVYLDNGVY |
| | | KFVTVKNLDVIKKENYYEVNSKCYEEAKKL |
| | | KKISNQAEFIASFYKNDLIKINGELYRVIG |
| | | VNNDLLNRIEVNMIDITYREYLENMNDKRP |
| | | PHIIKTIASKTQSIKKYSTDILGNLYEVKS |
| | | KKHPQIIKKG |
| Casphi-1 | 285 | MADTPTLFTQFLRHHLPGQRFRKDILKQAG |
| polypeptide | | RILANKGEDATIAFLRGKSEESPPDFQPPV |
| sequence | | KCPIIACSRPLTEWPIYQASVAIQGYVYGQ |
| | | SLAEFEASDPGCSKDGLLGWFDKTGVCTDY |
| | | FSVQGLNLIFQNARKRYIGVQTKVTNRNEK |
| | | RHKKLKRINAKRIAEGLPELTSDEPESALD |
| | | ETGHLIDPPGLNTNIYCYQQVSPKPLALSE |
| | | VNQLPTAYAGYSTSGDDPIQPMVTKDRLSI |
| | | SKGQPGYIPEHQRALLSQKKHRRMRGYGLK |
| | | ARALLVIVRIQDDWAVIDLRSLLRNAYWRR |
| | | IVQTKEPSTITKLLKLVTGDPVLDATRMVA |
| | | TFTYKPGIVQVRSAKCLKNKQGSKLFSERY |
| | | LNETVSVTSIDLGSNNLVAVATYRLVNGNT |
| | | PELLQRFTLPSHLVKDFERYKQAHDTLEDS |
| | | IQKTAVASLPQGQQTEIRMWSMYGFREAQE |
| | | RVCQELGLADGSIPWNVMTATSTILTDLFL |
| | | ARGGDPKKCMFTSEPKKKKNSKQVLYKIRD |
| | | RAWAKMYRTLLSKETREAWNKALWGLKR |
| | | GSPDYARLSKRKEELARRCVNYTISTAEKR |
| | | AQCGRTIVALEDLNIGFFHGRGKQEPGWVG |
| | | LFTRKKENRWLMQALHKAFLELAHHRGYHV |
| | | IEVNPAYTSQTCPVCRHCDPDNRDQHNREA |
| | | FHCIGCGFRGNADLDVATHNIAMVAITGES |
| | | LKRARGSVASKTPQPLAAE |
| Casphi-2 | 286 | MPKPAVESEFSKVLKKHFPGERFRSSYMKR |
| polypeptide | | GGKILAAQGEEAWAYLQGKSEEEPPNFQPP |
| sequence | | AKCHWTKSRDFAEWPIMKASEAIQRYIYAL |
| | | STTERAACKPGKSSESHAAWFAATGVSNHG |
| | | YSHVQGLNLIFDHTLGRYDGVLKKVQLRNE |
| | | KARARLESINASRADEGLPEIKAEEEEVAT |
| | | NETGHLLQPPGINPSFYVYQTISPQAYRPR |
| | | DEIVLPPEYAGYVRDPNAPIPLGWRNRCDI |
| | | QKGCPGYIPEWQREAGTAISPKTGKAVTVP |
| | | GLSPKKNKRMRRYWRSEKEKAQDALLVTVR |
| | | IGTDWWIDVRGLLRNARWRTIAPKDISLNA |
| | | LLDLFTGDPVIDVRRNIVTFTYTLDACGTY |
| | | ARKWTLKGKQTKATLDKLTATQTVALVAID |
| | | LGQTNPISAGISRVTQENGALQCEPLDRFT |
| | | LPDDLLKDISAYRIAWDRNEEELRARSVEA |
| | | LPEAQQAEVRALDGVSKETARTQLCADFGL |
| | | DPKRLPWDKMSSNTTFISEALLSNSVSRDQ |
| | | VFFTPAPKKGAKKKAPVEVMRKDRTWARAY |
| | | KPRLSVEAQKLKNEALWALKRTSPEYLKLS |
| | | RRKEELCRRSINYVIEKTRRRTQCQIVIPV |
| | | IEDLNVRFFHGSGKRLPGWDNFFTAKKENR |
| | | WFIQGLHKAFSDLRTHRSFYVFEVRPERTS |
| | | ITCPKCGHCEVGNRDGEAFQCLSCGKTCNA |
| | | DLDVATHNLTQVALTGKTMPKREEPRDAQG |
| | | TAPARKTKKASKSKAPPAEREDQTPAQEPS |
| | | QTS |
| Casphi-3 | 287 | MEKEITELTKIRREFPNKKFSSTDMKKAGK |
| polypeptide | | LLKAEGPDAVRDFLNSCQEIIGDFKPPVKT |
| sequence | | NIVSISRPFEEWPVSMVGRAIQEYYFSLTK |
| | | EELESVHPGTSSEDHKSFFNITGLSNYNYT |
| | | SVQGLNLIFKNAKAIYDGTLVKANNKNKKL |
| | | EKKFNEINHKRSLEGLPIITPDFEEPFDEN |
| | | GHLNNPPGINRNIYGYQGCAAKVFVPSKHK |
| | | MVSLPKEYEGYNRDPNLSLAGFRNRLEIPE |
| | | GEPGHVPWFQRMDIPEGQIGHVNKIQRFNF |
| | | VHGKNSGKVKFSDKTGRVKRYHHSKYKDAT |
| | | KPYKFLEESKKVSALDSILAIITIGDDWVV |
| | | FDIRGLYRNVFYRELAQKGLTAVQLLDLFT |
| | | GDPVIDPKKGVVTFSYKEGVVPVFSQKIVP |
| | | RFKSRDTLEKLTSQGPVALLSVDLGQNEPV |
| | | AARVCSLKNINDKITLDNSCRISFLDDYKK |
| | | QIKDYRDSLDELEIKIRLEAINSLETNQQV |
| | | EIRDLDVFSADRAKANTVDMFDIDPNLISW |
| | | DSMSDARVSTQISDLYLKNGGDESRVYFEI |
| | | NNKRIKRSDYNISQLVRPKLSDSTRKNLND |
| | | SIWKLKRTSEEYLKLSKRKLELSRAVVNYT |
| | | IRQSKLLSGINDIVIILEDLDVKKKFNGRG |
| | | IRDIGWDNFFSSRKENRWFIPAFHKAFSEL |
| | | SSNRGLCVIEVNPAWTSATCPDCGFCSKEN |
| | | RDGINFTCRKCGVSYHADIDVATLNIARVA |
| | | VLGKPMSGPADRERLGDTKKPRVARSRKTM |
| | | KRKDISNSTVEAMVTA |
| Casphi-4 | 288 | MYSLEMADLKSEPSLLAKLLRDRFPGKYWL |
| polypeptide | | PKYWKLAEKKRLTGGEEAACEYMADKQLDS |
| sequence | | PPPNFRPPARCVILAKSRPFEDWPVHRVAS |
| | | KAQSFVIGLSEQGFAALRAAPPSTADARRD |
| | | WLRSHGASEDDLMALEAQLLETIMGNAISL |
| | | HGGVLKKIDNANVKAAKRLSGRNEARLNKG |
| | | LQELPPEQEGSAYGADGLLVNPPGLNLNIY |
| | | CRKSCCPKPVKNTARFVGHYPGYLRDSDSI |
| | | LISGTMDRLTIIEGMPGHIPAWQREQGLVK |
| | | PGGRRRRLSGSESNMRQKVDPSTGPRRSTR |
| | | SGTVNRSNQRTGRNGDPLLVEIRMKEDWVL |
| | | LDARGLLRNLRWRESKRGLSCDHEDLSLSG |
| | | LLALFSGDPVIDPVRNEVVFLYGEGIIPVR |
| | | STKPVGTRQSKKLLERQASMGPLTLISCDL |
| | | GQTNLIAGRASAISLTHGSLGVRSSVRIEL |
| | | DPEIIKSFERLRKDADRLETEILTAAKETL |
| | | SDEQRGEVNSHEKDSPQTAKASLCRELGLH |
| | | PPSLPWGQMGPSTTFIADMLISHGRDDDAF |
| | | LSHGEFPTLEKRKKFDKRFCLESRPLLSSE |
| | | TRKALNESLWEVKRTSSEYARLSQRKKEMA |
| | | RRAVNFVVEISRRKTGLSNVIVNIEDLNVR |
| | | IFHGGGKQAPGWDGFFRPKSENRWFIQAIH |
| | | KAFSDLAAHHGIPVIESDPQRTSMTCPECG |
| | | HCDSKNRNGVRFLCKGCGASMDADFDAACR |
| | | NLERVALTGKPMPKPSTSCERLLSATTGKV |
| | | CSDHSLSHDAIEKAS |
| Casphi-5 | 289 | MSSLPTPLELLKQKHADLFKGLQFSSKDNK |
| polypeptide | | MAGKVLKKDGEEAALAFLSERGVSRGELPN |
| sequence | | FRPPAKTLVVAQSRPFEEFPIYRVSEAIQL |
| | | YVYSLSVKELETVPSGSSTKKEHQRFFQDS |
| | | SVPDFGYTSVQGLNKIFGLARGIYLGVITR |
| | | GENQLQKAKSKHEALNKKRRASGEAETEFD |
| | | PTPYEYMTPERKLAKPPGVNHSIMCYVDIS |
| | | VDEFDFRNPDGIVLPSEYAGYCREINTAIE |
| | | KGTVDRLGHLKGGPGYIPGHQRKESTTEGP |
| | | KINFRKGRIRRSYTALYAKRDSRRVRQGKL |
| | | ALPSYRHHMMRLNSNAESAILAVIFFGKDW |
| | | WFDLRGLLRNVRWRNLFVDGSTPSTLLGMF |
| | | GDPVIDPKRGVVAFCYKEQIVPVVSKSITK |
| | | MVKAPELLNKLYLKSEDPLVLVAIDLGQTN |
| | | PVGVGVYRVMNASLDYEWTRFALESELLRE |
| | | IESYRQRTNAFEAQIRAETFDAMTSEEQEE |
| | | ITRVRAFSASKAKENVCHRFGMPVDAVDWA |
| | | TMGSNTIHIAKWVMRHGDPSLVEVLEYRKD |
| | | NEIKLDKNGVPKKVKLTDKRIANLTSIRLR |
| | | FSQETSKHYNDTMWELRRKHPVYQKLSKSK |
| | | ADFSRRVVNSIIRRVNHLVPRARIVFIIED |
| | | LKNLGKVFHGSGKRELGWDSYFEPKSENRW |
| | | FIQVLHKAFSETGKHKGYYIIECWPNWTSC |
| | | TCPKCSCCDSENRHGEVFRCLACGYTCNTD |
| | | FGTAPDNLVKIATTGKGLPGPKKRCKGSSK |
| | | GKNPKIARSSETGVSVTESGAPKVKKSSPT |
| | | QTSQSSSQSAP |
| Casphi-6 | 290 | MNKIEKEKTPLAKLMNENFAGLRFPFAIIK |
| polypeptide | | QAGKKLLKEGELKTIEYMTGKGSIEPLPNF |
| sequence | | KPPVKCLIVAKRRDLKYFPICKASCEIQSY |
| | | VYSLNYKDFMDYFSTPMTSQKQHEEFFKKS |
| | | GLNIEYQNVAGLNLIFNNVKNTYNGVILKV |
| | | KNRNEKLKKKAIKNNYEFEEIKTFNDDGCL |
| | | INKPGINNVIYCFQSISPKILKNITHLPKE |
| | | YNDYDCSVDRNIIQKYVSRLDIPESQPGHV |
| | | PEWQRKLPEFNNTNNPRRRRKWYSNGRNIS |
| | | KGYSVDQVNQAKIEDSLLAQIKIGEDWIIL |
| | | DIRGLLRDLNRRELISYKNKLTIKDVLGFF |
| | | SDYPIIDIKKNLVTFCYKEGVIQVVSQKSI |
| | | GNKKSKQLLEKLIENKPIALVSIDLGQTNP |
| | | VSVKISKLNKINNKISIESFTYRFLNEEIL |
| | | KEIEKYRKDYDKLELKLINEA |
| Casphi-7 | 291 | MSNTAVSTREHMSNKTTPPSPLSLLLRAHF |
| polypeptide | | PGLKFESQDYKIAGKKLRDGGPEAVISYLT |
| sequence | | GKGQAKLKDVKPPAKAFVIAQSRPFIEWDL |
| | | VRVSRQIQEKIFGIPATKGRPKQDGLSETA |
| | | FNEAVASLEVDGKSKLNEETRAAFYEVLGL |
| | | DAPSLHAQAQNALIKSAISIREGVLKKVEN |
| | | RNEKNLSKTKRRKEAGEEATFVEEKAHDER |
| | | GYLIHPPGVNQTIPGYQAWIKSCPSDFIGL |
| | | PSGCLAKESAEALTDYLPHDRMTIPKGQPG |
| | | YVPEWQHP |
| | | LLNRRKNRRRRDWYSASLNKPKATCSKRSG |
| | | TPNRKNSRTDQIQSGRFKGAIPVLMRFQDE |
| | | WVIIDIRGLLRNARYRKLLKEKSTIPDLLS |
| | | LFTGDPSIDMRQGVCTFIYKAGQACSAKMV |
| | | KTKNAPEILSELTKSGPWLVSIDLGQTNPI |
| | | AAKVSRVTQLSDGQLSHETLLRELLSNDSS |
| | | DGKEIARYRVASDRLRDKLANLAVERLSPE |
| | | HKSEILRAKNDTPALCKARVCAALGLNPEM |
| | | IAWDKMTPYTEFLATAYLEKGGDRKVATLK |
| | | PKNRPEMLRRDIKFKGTEGVRIEVSPEAAE |
| | | AYREAQWDLQRTSPEYLRLSTWKQELTKRI |
| | | LNQLRHKAAKSSQCEVVVMAFEDLNIKMMH |
| | | GNGKWADGGWDAFFIKKRENRWFMQAFHKS |
| | | LTELGAHKGVPTIEVTPHRTSITCTKCGHC |
| | | DKANRDGERFACQKCGFVAHADLEIATDNI |
| | | ERVALTGKPMPKPESERSGDAKKSVGARKA |
| | | AFKPEEDAEAAE |
| Casphi-8 | 292 | MIKPTVSQFLTPGFKLIRNHSRTAGLKLKN |
| polypeptide | | EGEEACKKFVRENEIPKDECPNFQGGPAIA |
| sequence | | NIIAKSREFTEWEIYQSSLAIQEVIFTLPK |
| | | DKLPEPILKEEWRAQWLSEHGLDTVPYKEA |
| | | AGLNLIIKNAVNTYKGVQVKVDNKNKNNLA |
| | | KINRKNEIAKLNGEQEISFEEIKAFDDKGY |
| | | LLQKPSPNKSIYCYQSVSPKPFITSKYHNV |
| | | NLPEEYIGYYRKSNEPIVSPYQFDRLRIPI |
| | | GEPGYVPKWQYTFLSKKENKRRKLSKRIKN |
| | | VSPILGIICIKKDWCVFDMRGLLRTNHWKK |
| | | YHKPTDSINDLFDYFTGDPVIDTKANWRFR |
| | | YKMENGIVNYKPVREKKGKELLENICDQNG |
| | | SCKLATVDVGQNNPVAIGLFELKKVNGELT |
| | | KTLISRHPTPIDFCNKITAYRERYDKLESS |
| | | IKLDAIKQLTSEQKIEVDNYNNNFTPQNTK |
| | | QIVCSKLNINPNDLPWDKMISGTHFISEKA |
| | | QVSNKSEIYFTSTDKGKTKDVMKSDYKWFQ |
| | | DYKPKLSKEVRDALSDIEWRLRRESLEFNK |
| | | LSKSREQDARQLANWISSMCDVIGIENLVK |
| | | KNNFFGGSGKREPGWDNFYKPKKENRWWIN |
| | | AIHKALTELSQNKGKRVILLPAMRTSITCP |
| | | KCKYCDSKNRNGEKFNCLKCGIELNADIDV |
| | | ATENLATVAITAQSMPKPTCERSGDAKKPV |
| | | RARKAKAPEFHDKLAPSYTVVLREAV |
| Casphi-9 | 293 | MRSSREIGDKILMRQPAEKTAFQVFRQEVI |
| polypeptide | | GTQKLSGGDAKTAGRLYKQGKMEAAREWLL |
| sequence | | KGARDDVPPNFQPPAKCLWAVSHPFEEWDI |
| | | SKTNHDVQAYIYAQPLQAEGHLNGLSEKWE |
| | | DTSADQHKLWFEKTGVPDRGLPVQAINKIA |
| | | KAAVNRAFGVVRKVENRNEKRRSRDNRIAE |
| | | HNRENGLTEVVREAPEVATNADGFLLHPPG |
| | | IDPSILSYASVSPVPYNSSKHSFVRLPEEY |
| | | QAYNVEPDAPIPQFWEDRFAIPPGQPGYVP |
| | | EWQRLKCSTNKHRRMRQWSNQDYKPKAGRR |
| | | AKPLEFQAHLTRERAKGALLVVMRIKEDWV |
| | | VFDVRGLLRNVEWRKVLSEEAREKLTLKGL |
| | | LDLFTGDPVIDTKRGIVTFLYKAEITKILS |
| | | KRTVKTKNARDLLLRLTEPGEDGLRREVGL |
| | | VAVDLGQTHPIAAAIYRIGRTSAGALESTV |
| | | LHRQGLREDQKEKLKEYRKRHTALDSRLRK |
| | | EAFETLSVEQQKEIVTVSGSGAQITKDKVC |
| | | NYLGVDPSTLPWEKMGSYTHFISDDFLRRG |
| | | GDPNIVHFDRQPKKGKVSKKSQRIKRSDSQ |
| | | WVGRMRPRLSQETAKARMEADWAAQNENEE |
| | | YKRLARSKQELARWCVNTLLQNTRCITQCD |
| | | EIVVVIEDLNVKSLHGKGAREPGWDNFFTP |
| | | KTENRWFIQILHKTFSELPKHRGEHVIEGC |
| | | PLRTSITCPACSYCDKNSRNGEKFVCVACG |
| | | ATFHADFEVATYNLVRLATTGMPMPKSLER |
| | | QGGGEKAGGARKARKKAKQVEKIVVQANAN |
| | | VTMNGASLHSP |
| Casphi-10 | 294 | MDMLDTETNYATETPAQQQDYSPKPPKKAQ |
| polypeptide | | RAPKGFSKKARPEKKPPKPITLFTQKHFSG |
| sequence | | VRFLKRVIRDASKILKLSESRTITFLEQAI |
| | | ERDGSAPPDVTPPVHNTIMAVTRPFEEWPE |
| | | VILSKALQKHCYALTKKIKIKTWPKKGPGK |
| | | KCLAAWSARTKIPLIPGQVQATNGLFDRIG |
| | | SIYDGVEKKVTNRNANKKLEYDEAIKEGRN |
| | | PAVPEYETAYNIDGTLINKPGYNPNLYITQ |
| | | SRTPRLITEADRPLVEKILWQMVEKKTQSR |
| | | NQARRARLEKAAHLQGLPVPKFVPEKVDRS |
| | | QKIEIRIIDPLDKIEPYMPQDRMAIKASQD |
| | | GHVPYWQRPFLSKRRNRRVRAGWGKQVSSI |
| | | QAWLTGALLVIVRLGNEAFLADIRGALRNA |
| | | QWRKLLKPDATYQSLFNLFTGDPVVNTRTN |
| | | HLTMAYREGVVNIVKSRSFKGRQTREHLLT |
| | | LLGQGKTVAGVSFDLGQKHAAGLLAAHFGL |
| | | GEDGNPVFTPIQACFLPQRYLDSLTNYRNR |
| | | YDALTLDMRRQSLLALTPAQQQEFADAQRD |
| | | PGGQAKRACCLKLNLNPDEIRWDLVSGIST |
| | | MISDLYIERGGDPRDVHQQVETKPKGKRKS |
| | | EIRILKIRDGKWAYDFRPKIADETRKAQRE |
| | | QLWKLQKASSEFERLSRYKINI |
| | | ARAIANWALQWGRELSGCDIVIPVLEDLNV |
| | | GSKFFDGKGKWLLGWDNRFTPKKENRWFIK |
| | | VLHKAVAELAPHRGVPVYEVMPHRTSMTCP |
| | | ACHYCHPTNREGDRFECQSCHVVKNTDRDV |
| | | APYNILRVAVEGKTLDRWQAEKKPQAEPDR |
| | | PMILIDNQES |
| >sp\|P14739\| | 106 | MTNLSDIIEKETGKQLVIQESILMLPEEVE |
| UNGI_ | | EVIGNKPESDILVHTAYDESTDENVMLLTS |
| BPPB2 | | D APEYKPWALVIQDSNGENKIKML |
| Uracil- | | |
| DNA | | |
| glycosylase | | |
| inhibitor | | |
| Cas12b/ | 258 | MAVKSIKVKLRLDDMPEIRAGLWKLHKEVN |
| C2c1 | | AGVRYYTEWLSLLRQENLYRRSPNGDGEQE |
| | | CDKTAEECKAELLERLRARQVENGHRGPAG |
| | | SDDELLQLARQLYELLVPQAIGAKGDAQQI |
| | | ARKFLSPLADKDAVGGLGIAKAGNKPRWVR |
| | | MREAGEPGWEEEKEKAETRKSADRTADVLR |
| | | ALADFGLKPLMRVYTDSEMSSVEWKPLRKG |
| | | QAVRTWDRDMFQQAIERMMSWESWNQRVGQ |
| | | EYAKLVEQKNRFEQKNFVGQEHLVHLVNQL |
| | | QQDMKEASPGLESKEQTAHYVTGRALRGSD |
| | | KVFEKWGKLAPDAPFDLYDAEIKNVQRRNT |
| | | RRFGSHDLFAKLAEPEYQALWREDASFLTR |
| | | YAVYNSILRKLNHAKMFATFTLPDATAHPI |
| | | WTRFDKLGGNLHQYTFLFNEFGERRHAIRF |
| | | HKLLKVENGVAREVDDVTVPISMSEQLDNL |
| | | LPRDPNEPIALYFRDYGAEQHFTGEFGGAK |
| | | IQCRRDQLAHMHRRRGARDVYLNVSVRVQS |
| | | QSEARGERRPPYAAVFRLVGDNHRAFVHFD |
| | | KLSDYLAEHPDDGKLGSEGLLSGLRVMSVD |
| | | LGLRTSASISVFRVARKDELKPNSKGRVPF |
| | | FFPIKGNDNLVAVHERSQLLKLPGETESKD |
| | | LRAIREERQRTLRQLRTQLAYLRLLVRCGS |
| | | EDVGRRERSWAKLIEQPVDAANHMTPDWRE |
| | | AFENELQKLKSLHGICSDKEWMDAVYESVR |
| | | RVWRHMGKQVRDWRKDVRSGERPKIRGYAK |
| | | DVVGGNSIEQIEYLERQYKFLKSWSFFGKV |
| | | SGQVIRAEKGSRFAITLREHIDHAKEDRLK |
| | | KLADRIIMEALGYVYALDERGKGKWVAKYP |
| | | PCQLILLEELSEYQFNNDRPPSENNQLMQW |
| | | SHRGVFQELINQAQVHDLLVGTMYAAFSSR |
| | | FDARTGAPGIRCRRVPARCTQEHNPEPFPV |
| | | WVLNKFWEHTLDACPLRADDLIPTGEGEIF |
| | | VSPFSAEEGDFHQIHADLNAAQNLQQRLWS |
| | | DFDISQIRLRCDWGEVDGELVLIPRLTGKR |
| | | TADSYSNKVFYTNTGVTYYERERGKKRRKV |
| | | FAQEKLSEEEAELLVEADEAREKSWLMRDP |
| | | SGIINRGNWTRQKEFWSMVNQRIEGYLVKQ |
| | | IRSRVPLQDSACENTGDI |
| high | 1423 | MDKKYSIGLAIGTNSVGWAVITDEYKVPSK |
| fidelity | | KFKVLGNTDRHSIKKNLIGALLFDSGETAE |
| Cas9 | | ATRLKRTARRRYTRRKNRICYLQEIFSNEM |
| polypeptide | | AKVDDSFFHRLEESFLVEEDKKHERHPIFG |
| sequence | | NIVDEVAYHEKYPTIYHLRKKLVDSTDKAD |
| | | LRLIYLALAHMIKFRGHFLIEGDLNPDNSD |
| | | VDKLFIQLVQTYNQLFEENPINASGVDAKA |
| | | ILSARLSKSRRLENLIAQLPGEKKNGLFGN |
| | | LIALSLGLTPNFKSNFDLAEDAKLQLSKDT |
| | | YDDDLDNLLAQIGDQYADLFLAAKNLSDAI |
| | | LLSDILRVNTEITKAPLSASMIKRYDEHHQ |
| | | DLTLLKALVRQQLPEKYKEIFFDQSKNGYA |
| | | GYIDGGASQEEFYKFIKPILEKMDGTEELL |
| | | VKLNREDLLRKQRTFDNGSIPHQIHLGELH |
| | | AILRRQEDFYPFLKDNREKIEKILTFRIPY |
| | | YVGPLARGNSRFAWMTRKSEETITPWNFEE |
| | | VVDKGASAQSFIERMTAFDKNLPNEKVLPK |
| | | HSLLYEYFTVYNELTKVKYVTEGMRKPAFL |
| | | SGEQKKAIVDLLFKTNRKVTVKQLKEDYFK |
| | | KIECFDSVEISGVEDRFNASLGTYHDLLKI |
| | | IKDKDFLDNEENEDILEDIVLTLTLFEDRE |
| | | MIEERLKTYAHLFDDKVMKQLKRRRYTGWG |
| | | ALSRKLINGIRDKQSGKTILDFLKSDGFAN |
| | | RNFMALIHDDSLTFKEDIQKAQVSGQGDSL |
| | | HEHIANLAGSPAIKKGILQTVKWDELVKVM |
| | | GRHKPENIVIEMARENQTTQKGQKNSRERM |
| | | KRIEEGIKELGSQILKEHPVENTQLQNEKL |
| | | YLYYLQNGRDMYVDQELDINRLSDYDVDHI |
| | | VPQSFLKDDSIDNKVLTRSDKNRGKSDNVP |
| | | SEEVVKKMKNYWRQLLNAKLITQRKFDNLT |
| | | KAERGGLSELDKAGFIKRQLVETRAITKHV |
| | | AQILDSRMNTKYDENDKLIREVKVITLKSK |
| | | LVSDFRKDFQFYKVREINNYHHAHDAYLNA |
| | | WGTALIKKYPKLESEFVYGDYKVYDVRKMI |
| | | AKSEQEIGKATAKYFFYSNIMNFFKTEITL |
| | | ANGEIRKRPLIETNGETGEIVWDKGRDFAT |
| | | VRKVLSMPQVNIVKKTEVQTGGFSKESILP |
| | | KRNSDKLIARKKDWDPKKYGGFDSPTVAYS |
| | | VLVVAKVEKGKSKKLKSVKELLGITIMERS |
| | | SFEKNPIDFLEAKGYKEVKKDLIIKLPKYS |
| | | LFELENGRKRMLASAGELQKGNELALPSKY |
| | | VNFLYLASHYEKLKGSPEDNEQKQLFVEQH |
| | | KHYLDEIIEQISEFSKRVILADANLDKVLS |
| | | AYNKHRDKPIREQAENIIHLFTLTNLGAPA |
| | | AFKYFDTTIDRKRYTSTKEVLDATLIHQSI |
| | | TGLYETRIDLSQLGGD |
| Wt Cas9 | 233 | ATGGATAAAAAGTATTCTATTGGTTTAGAC |
| domain | | ATCGGCACTAATTCCGTTGGATGGGCTGTC |
| | | ATAACCGATGAATACAAAGTACCTTCAAAG |
| | | AAATTTAAGGTGTTGGGGAACACAGACCGT |
| | | CATTCGATTAAAAAGAATCTTATCGGTGCC |
| | | CTCCTATTCGATAGTGGCGAAACGGCAGAG |
| | | GCGACTCGCCTGAAACGAACCGCTCGGAGA |
| | | AGGTATACACGTCGCAAGAACCGAATATGT |
| | | TACTTACAAGAAATTTTTAGCAATGAGATG |
| | | GCCAAAGTTGACGATTCTTTCTTTCACCGT |
| | | TTGGAAGAGTCCTTCCTTGTCGAAGAGGAC |
| | | AAGAAACATGAACGGCACCCCATCTTTGGA |
| | | AACATAGTAGATGAGGTGGCATATCATGAA |
| | | AAGTACCCAACGATTTATCACCTCAGAAAA |
| | | AAGCTAGTTGACTCAACTGATAAAGCGGAC |
| | | CTGAGGTTAATCTACTTGGCTCTTGCCCAT |
| | | ATGATAAAGTTCCGTGGGCACTTTCTCATT |
| | | GAGGGTGATCTAAATCCGGACAACTCGGAT |
| | | GTCGACAAACTGTTCATCCAGTTAGTACAA |
| | | ACCTATAATCAGTTGTTTGAAGAGAACCCT |
| | | ATAAATGCAAGTGGCGTGGATGCGAAGGCT |
| | | ATTCTTAGCGCCCGCCTCTCTAAATCCCGA |
| | | CGGCTAGAAAACCTGATCGCACAATTACCC |
| | | GGAGAGAAGAAAAATGGGTTGTTCGGTAAC |
| | | CTTATAGCGCTCTCACTAGGCCTGACACCA |
| | | AATTTTAAGTCGAACTTCGACTTAGCTGAA |
| | | GATGCCAAATTGCAGCTTAGTAAGGACACG |
| | | TACGATGACGATCTCGACAATCTACTGGCA |
| | | CAAATTGGAGATCAGTATGCGGACTTATTT |
| | | TTGGCTGCCAAAAACCTTAGCGATGCAATC |
| | | CTCCTATCTGACATACTGAGAGTTAATACT |
| | | GAGATTACCAAGGCGCCGTTATCCGCTTCA |
| | | ATGATCAAAAGGTACGATGAACATCACCAA |
| | | GACTTGACACTTCTCAAGGCCCTAGTCCGT |
| | | CAGCAACTGCCTGAGAAATATAAGGAAATA |
| | | TTCTTTGATCAGTCGAAAAACGGGTACGCA |
| | | GGTTATATTGACGGCGGAGCGAGTCAAGAG |
| | | GAATTCTACAAGTTTATCAAACCCATATTA |
| | | GAGAAGATGGATGGGACGGAAGAGTTGCTT |
| | | GTAAAACTCAATCGCGAAGATCTACTGCGA |
| | | AAGCAGCGGACTTTCGACAACGGTAGCATT |
| | | CCACATCAAATCCACTTAGGCGAATTGCAT |
| | | GCTATACTTAGAAGGCAGGAGGATTTTTAT |
| | | CCGTTCCTCAAAGACAATCGTGAAAAGATT |
| | | GAGAAAATCCTAACCTTTCGCATACCTTAC |
| | | TATGTGGGACCCCTGGCCCGAGGGAACTCT |
| | | CGGTTCGCATGGATGACAAGAAAGTCCGAA |
| | | GAAACGATTACTCCATGGAATTTTGAGGAA |
| | | GTTGTCGATAAAGGTGCGTCAGCTCAATCG |
| | | TTCATCGAGAGGATGACCAACTTTGACAAG |
| | | AATTTACCGAACGAAAAAGTATTGCCTAAG |
| | | CACAGTTTACTTTACGAGTATTTCACAGTG |
| | | TACAATGAACTCACGAAAGTTAAGTATGTC |
| | | ACTGAGGGCATGCGTAAACCCGCCTTTCTA |
| | | AGCGGAGAACAGAAGAAAGCAATAGTAGAT |
| | | CTGTTATTCAAGACCAACCGCAAAGTGACA |
| | | GTTAAGCAATTGAAAGAGGACTACTTTAAG |
| | | AAAATTGAATGCTTCGATTCTGTCGAGATC |
| | | TCCGGGGTAGAAGATCGATTTAATGCGTCA |
| | | CTTGGTACGTATCATGACCTCCTAAAGATA |
| | | ATTAAAGATAAGGACTTCCTGGATAACGAA |
| | | GAGAATGAAGATATCTTAGAAGATATAGTG |
| | | TTGACTCTTACCCTCTTTGAAGATCGGGAA |
| | | ATGATTGAGGAAAGACTAAAAACATACGCT |
| | | CACCTGTTCGACGATAAGGTTATGAAACAG |
| | | TTAAAGAGGCGTCGCTATACGGGCTGGGGA |
| | | CGATTGTCGCGGAAACTTATCAACGGGATA |
| | | AGAGACAAGCAAAGTGGTAAAACTATTCTC |
| | | GATTTTCTAAAGAGCGACGGCTTCGCCAAT |
| | | AGGAACTTTATGCAGCTGATCCATGATGAC |
| | | TCTTTAACCTTCAAAGAGGATATACAAAAG |
| | | GCACAGGTTTCCGGACAAGGGGACTCATTG |
| | | CACGAACATATTGCGAATCTTGCTGGTTCG |
| | | CCAGCCATCAAAAAGGGCATACTCCAGACA |
| | | GTCAAAGTAGTGGATGAGCTAGTTAAGGTC |
| | | ATGGGACGTCACAAACCGGAAAACATTGTA |
| | | ATCGAGATGGCACGCGAAAATCAAACGACT |
| | | CAGAAGGGGCAAAAAAACAGTCGAGAGCGG |
| | | ATGAAGAGAATAGAAGAGGGTATTAAAGAA |
| | | CTGGGCAGCCAGATCTTAAAGGAGCATCCT |
| | | GTGGAAAATACCCAATTGCAGAACGAGAAA |
| | | CTTTACCTCTATTACCTACAAAATGGAAGG |
| | | GACATGTATGTTGATCAGGAACTGGACATA |
| | | AACCGTTTATCTGATTACGACGTCGATCAC |
| | | ATTGTACCCCAATCCTTTTTGAAGGACGAT |
| | | TCAATCGACAATAAAGTGCTTACACGCTCG |
| | | GATAAGAACCGAGGGAAAAGTGACAATGTT |
| | | CCAAGCGAGGAAGTCGTAAAGAAAATGAAG |
| | | AACTATTGGCGGCAGCTCCTAAATGCGAAA |
| | | CTGATAACGCAAAGAAAGTTCGATAACTTA |
| | | ACTAAAGCTGAGAGGGGTGGCTTGTCTGAA |
| | | CTTGACAAGGCCGGATTTATTAAACGTCAG |
| | | CTCGTGGAAACCCGCCAAATCACAAAGCAT |
| | | GTTGCACAGATACTAGATTCCCGAATGAAT |
| | | ACGAAATACGACGAGAACGATAAGCTGATT |
| | | CGGGAAGTCAAAGTAATCACTTTAAAGTCA |
| | | AAATTGGTGTCGGACTTCAGAAAGGATTTT |
| | | CAATTCTATAAAGTTAGGGAGATAAATAAC |
| | | TACCACCATGCGCACGACGCTTATCTTAAT |
| | | GCCGTCGTAGGGACCGCACTCATTAAGAAA |
| | | TACCCGAAGCTAGAAAGTGAGTTTGTGTAT |
| | | GGTGATTACAAAGTTTATGACGTCCGTAAG |
| | | ATGATCGCGAAAAGCGAACAGGAGATAGGC |
| | | AAGGCTACAGCCAAATACTTCTTTTATTCT |
| | | AACATTATGAATTTCTTTAAGACGGAAATC |
| | | ACTCTGGCAAACGGAGAGATACGCAAACGA |
| | | CCTTTAATTGAAACCAATGGGGAGACAGGT |
| | | GAAATCGTATGGGATAAGGGCCGGGACTTC |
| | | GCGACGGTGAGAAAAGTTTTGTCCATGCCC |
| | | CAAGTCAACATAGTAAAGAAAACTGAGGTG |
| | | CAGACCGGAGGGTTTTCAAAGGAATCGATT |
| | | CTTCCAAAAAGGAATAGTGATAAGCTCATC |
| | | GCTCGTAAAAAGGACTGGGACCCGAAAAAG |
| | | TACGGTGGCTTCGATAGCCCTACAGTTGCC |
| | | TATTCTGTCCTAGTAGTGGCAAAAGTTGAG |
| | | AAGGGAAAATCCAAGAAACTGAAGTCAGTC |
| | | AAAGAATTATTGGGGATAACGATTATGGAG |
| | | CGCTCGTCTTTTGAAAAGAACCCCATCGAC |
| | | TTCCTTGAGGCGAAAGGTTACAAGGAAGTA |
| | | AAAAAGGATCTCATAATTAAACTACCAAAG |
| | | TATAGTCTGTTTGAGTTAGAAAATGGCCGA |
| | | AAACGGATGTTGGCTAGCGCCGGAGAGCTT |
| | | CAAAAGGGGAACGAACTCGCACTACCGTCT |
| | | AAATACGTGAATTTCCTGTATTTAGCGTCC |
| | | CATTACGAGAAGTTGAAAGGTTCACCTGAA |
| | | GATAACGAACAGAAGCAACTTTTTGTTGAG |
| | | CAGCACAAACATTATCTCGACGAAATCATA |
| | | GAGCAAATTTCGGAATTCAGTAAGAGAGTC |
| | | ATCCTAGCTGATGCCAATCTGGACAAAGTA |
| | | TTAAGCGCATACAACAAGCACAGGGATAAA |
| | | CCCATACGTGAGCAGGCGGAAAATATTATC |
| | | CATTTGTTTACTCTTACCAACCTCGGCGCT |
| | | CCAGCCGCATTCAAGTATTTTGACACAACG |
| | | ATAGATCGCAAACGATACACTTCTACCAAG |
| | | GAGGTGCTAGACGCGACACTGATTCACCAA |
| | | TCCATCACGGGATTATATGAAACTCGGATA |
| | | GATTTGTCACAGCTTGGGGGTGACGGATCC |
| | | CCCAAGAAGAAGAGGAAAGTCTCGAGCGAC |
| | | TACAAAGACCATGACGGTGATTATAAAGAT |
| | | CATGACATCGATTACAAGGATGACGATGAC |
| | | AAGGCTGCAGGA |
| wild-type | 234 | MDKKYSIGLAIGTNSVGWAVITDEYKVPSK |
| Cas9 | | KFKVLGNTDRHSIKKNLIGALLFDSGETAE |
| polypeptide | | ATRLKRTARRRYTRRKNRICYLQEIFSNEM |
| sequence | | AKVDDSFFHRLEESFLVEEDKKHERHPIFG |
| | | NIVDEVAYHEKYPTIYHLRKKLVDSTDKAD |
| | | LRLIYLALAHMIKFRGHFLIEGDLNPDNSD |
| | | VDKLFIQLVQTYNQLFEENPINASGVDAKA |
| | | ILSARLSKSRRLENLIAQLPGEKKNGLFGN |
| | | LIALSLGLTPNFKSNFDLAEDAKLQLSKDT |
| | | YDDDLDNLLAQIGDQYADLFLAAKNLSDAI |
| | | LLSDILRVNTEITKAPLSASMIKRYDEHHQ |
| | | DLTLLKALVRQQLPEKYKEIFFDQSKNGYA |
| | | GYIDGGASQEEFYKFIKPILEKMDGTEELL |
| | | VKLNREDLLRKQRTFDNGSIPHQIHLGELH |
| | | AILRRQEDFYPFLKDNREKIEKILTFRIPY |
| | | YVGPLARGNSRFAWMTRKSEETITPWNFEE |
| | | VVDKGASAQSFIERMTNFDKNLPNEKVLPK |
| | | HSLLYEYFTVYNELTKVKYVTEGMRKPAFL |
| | | SGEQKKAIVDLLFKTNRKVTVKQLKEDYFK |
| | | KIECFDSVEISGVEDRFNASLGTYHDLLKI |
| | | IKDKDFLDNEENEDILEDIVLTLTLFEDRE |
| | | MIEERLKTYAHLFDDKVMKQLKRRRYTGWG |
| | | RLSRKLINGIRDKQSGKTILDFLKSDGFAN |
| | | RNFMQLIHDDSLTFKEDIQKAQVSGQGDSL |
| | | HEHIANLAGSPAIKKGILQTVKVVDELVKV |
| | | MGRHKPENIVIEMARENQTTQKGQKNSRER |
| | | MKRIEEGIKELGSQILKEHPVENTQLQNEK |
| | | LYLYYLQNGRDMYVDQELDINRLSDYDVDH |
| | | IVPQSFLKDDSIDNKVLTRSDKNRGKSDNV |
| | | PSEEWKKMKNYWRQLLNAKLITQRKFDNLT |
| | | KAERGGLSELDKAGFIKRQLVETRQITKHV |
| | | AQILDSRMNTKYDENDKLIREVKVITLKSK |
| | | LVSDFRKDFQFYKVREINNYHHAHDAYLNA |
| | | WGTALIKKYPKLESEFVYGDYKVYDVRKMI |
| | | AKSEQEIGKATAKYFFYSNIMNFFKTEITL |
| | | ANGEIRKRPLIETNGETGEIVWDKGRDFAT |
| | | VRKVLSMPQVNIVKKTEVQTGGFSKESILP |
| | | KRNSDKLIARKKDWDPKKYGGFDSPTVAYS |
| | | VLVVAKVEKGKSKKLKSVKELLGITIMERS |
| | | SFEKNPIDFLEAKGYKEVKKDLIIKLPKYS |
| | | LFELENGRKRMLASAGELQKGNELALPSKY |
| | | VNFLYLASHYEKLKGSPEDNEQKQLFVEQH |
| | | KHYLDEIIEQISEFSKRVILADANLDKVLS |
| | | AYNKHRDKPIREQAENIIHLFTLTNLGAPA |
| | | AFKYFDTTIDRKRYTSTKEVLDATLIHQSI |
| | | TGLYETRIDLSQLGGD |
| PAM- | 1304 | MDKKYSIGLAIGTNSVGWAVITDEYKVPSK |
| binding | | KFKVLGNTDRHSIKKNLIGALLFDSGETAE |
| SpEQR Cas9 | | ATRLKRTARRRYTRRKNRICYLQEIFSNEM |
| polypeptide | | AKVDDSFFHRLEESVLVEEDKKHERHPIFG |
| sequence | | NIVDEVAYHEKYPTIYHLRKKLVDSTDKAD |
| | | LRLIYLALAHMIKFRGHFLIEGDLNPDNSD |
| | | VDKLFIQLVQTYNQLFEENPINASGVDAKA |
| | | ILSARLSKSRRLENLIAQLPGEKKNGLFGN |
| | | LIALSLGLTPNFKSNFDLAEDAKLQLSKDT |
| | | YDDDLDNLLAQIGDQYADLFLAAKNLSDAI |
| | | LLSDILRVNTEITKAPLSASMIKRYDEHHQ |
| | | DLTLLKALVRQQLPEKYKEIFFDQSKNGYA |
| | | GYIDGGASQEEFYKFIKPILEKMDGTEELL |
| | | VKLNREDLLRKQRTFDNGSIPHQIHLGELH |
| | | AILRRQEDFYPFLKDNREKIEKILTFRIPY |
| | | YVGPLARGNSRFAWMTRKSEETITPWNFEE |
| | | VVDKGASAQSFIERMTNFDKNLPNEKVLPK |
| | | HSLLYEYFTVYNELTKVKYVTEGMRKPAFL |
| | | SGEQKKAIVDLLFKTNRKVTVKQLKEDYFK |
| | | KIECFDSVEISGVEDRFNASLGTYHDLLKI |
| | | IKDKDFLDNEENEDILEDIVLTLTLFEDRE |
| | | MIEERLKTYAHLFDDKVMKQLKRRRYTGWG |
| | | RLSRKLINGIRDKQSGKTILDFLKSDGFAN |
| | | RNFMQLIHDDSLTFKEDIQKAQVSGQGDSL |
| | | HEHIANLAGSPAIKKGILQTVKWDELVKVM |
| | | GRHKPENIVIEMARENQTTQKGQKNSRERM |
| | | KRIEEGIKELGSQILKEHPVENTQLQNEKL |
| | | YLYYLQNGRDMYVDQELDINRLSDYDVDHI |
| | | VPQSFLKDDSIDNKVLTRSDKNRGKSDNVP |
| | | SEEVVKKMKNYWRQLLNAKLITQRKFDNLT |
| | | KAERGGLSELDKAGFIKRQLVETRQITKHV |
| | | AQILDSRMNTKYDENDKLIREVKVITLKSK |
| | | LVSDFRKDFQFYKVREINNYHHAHDAYLNA |
| | | WGTALIKKYPKLESEFVYGDYKVYDVRKMI |
| | | AKSEQEIGKATAKYFFYSNIMNFFKTEITL |
| | | ANGEIRKRPLIETNGETGEIVWDKGRDFAT |
| | | VRKVLSMPQVNIVKKTEVQTGGFSKESILP |
| | | KRNSDKLIARKKDWDPKKYGGFESPTVAYS |
| | | VLVVAKVEKGKSKKLKSVKELLGITIMERS |
| | | SFEKNPIDFLEAKGYKEVKKDLIIKLPKYS |
| | | LFELENGRKRMLASAGELQKGNELALPSKY |
| | | VNFLYLASHYEKLKGSPEDNEQKQLFVEQH |
| | | KHYLDEIIEQISEFSKRVILADANLDKVLS |
| | | AYNKHRDKPIREQAENIIHLFTLTNLGAPA |
| | | AFKYFDTTIDRKQYRSTKEVLDATLIHQSI |
| | | TGLYETRIDLSQLGGD |
| PAM- | 1305 | MDKKYSIGLAIGTNSVGWAVITDEYKVPSK |
| binding | | KFKVLGNTDRHSIKKNLIGALLFDSGETAE |
| SpVQR Cas9 | | ATRLKRTARRRYTRRKNRICYLQEIFSNEM |
| polypeptide | | AKVDDSFFHRLEESFLVEEDKKHERHPIFG |
| sequence | | NIVDEVAYHEKYPTIYHLRKKLVDSTDKAD |
| | | LRLIYLALAHMIKFRGHFLIEGDLNPDNSD |
| | | VDKLFIQLVQTYNQLFEENPINASGVDAKA |
| | | ILSARLSKSRRLENLIAQLPGEKKNGLFGN |
| | | LIALSLGLTPNFKSNFDLAEDAKLQLSKDT |
| | | YDDDLDNLLAQIGDQYADLFLAAKNLSDAI |
| | | LLSDILRVNTEITKAPLSASMIKRYDEHHQ |
| | | DLTLLKALVRQQLPEKYKEIFFDQSKNGYA |
| | | GYIDGGASQEEFYKFIKPILEKMDGTEELL |
| | | VKLNREDLLRKQRTFDNGSIPHQIHLGELH |
| | | AILRRQEDFYPFLKDNREKIEKILTFRIPY |
| | | YVGPLARGNSRFAWMTRKSEETITPWNFEE |
| | | VVDKGASAQSFIERMTNFDKNLPNEKVLPK |
| | | HSLLYEYFTVYNELTKVKYVTEGMRKPAFL |
| | | SGEQKKAIVDLLFKTNRKVTVKQLKEDYFK |
| | | KIECFDSVEISGVEDRFNASLGTYHDLLKI |
| | | IKDKDFLDNEENEDILEDIVLTLTLFEDRE |
| | | MIEERLKTYAHLFDDKVMKQLKRRRYTGWG |
| | | RLSRKLINGIRDKQSGKTILDFLKSDGFAN |
| | | RNFMQLIHDDSLTFKEDIQKAQVSGQGDSL |
| | | HEHIANLAGSPAIKKGILQTVKVVDELVKV |
| | | MGRHKPENIVIEMARENQTTQKGQKNSRER |
| | | MKRIEEGIKELGSQILKEHPVENTQLQNEK |
| | | LYLYYLQNGRDMYVDQELDINRLSDYDVDH |
| | | IVPQSFLKDDSIDNKVLTRSDKNRGKSDNV |
| | | PSEEVVKKMKNYWRQLLNAKLITQRKFDNL |
| | | TKAERGGLSELDKAGFIKRQLVETRQITKH |
| | | VAQILDSRMNTKYDENDKLIREVKVITLKS |
| | | KLVSDFRKDFQFYKVREINNYHHAHDAYLN |
| | | AWGTALIKKYPKLESEFVYGDYKVYDVRKM |
| | | IAKSEQEIGKATAKYFFYSNIMNFFKTEIT |
| | | LANGEIRKRPLIETNGETGEIVWDKGRDFA |
| | | TVRKVLSMPQVNIVKKTEVQTGGFSKESIL |
| | | PKRNSDKLIARKKDWDPKKYGGFVSPTVAY |
| | | SVLVVAKVEKGKSKKLKSVKELLGITIMER |
| | | SSFEKNPIDFLEAKGYKEVKKDLIIKLPKY |
| | | SLFELENGRKRMLASAGELQKGNELALPSK |
| | | YVNFLYLASHYEKLKGSPEDNEQKQLFVEQ |
| | | HKHYLDEIIEQISEFSKRVILADANLDKVL |
| | | SAYNKHRDKPIREQAENIIHLFTLTNLGAP |
| | | AAFKYFDTTIDRKQYRSTKEVLDATLIHQS |
| | | ITGLYETRIDLSQLGGD |
| SpVQR Cas9 | 1306 | MDKKYSIGLAIGTNSVGWAVITDEYKVPSK |
| polypeptide | | KFKVLGNTDRHSIKKNLIGALLFDSGETAE |
| sequence | | ATRLKRTARRRYTRRKNRICYLQEIFSNEM |
| | | AKVDDSFFHRLEESFLVEEDKKHERHPIFG |
| | | NIVDEVAYHEKYPTIYHLRKKLVDSTDKAD |
| | | LRLIYLALAHMIKFRGHFLIEGDLNPDNSD |
| | | VDKLFIQLVQTYNQLFEENPINASGVDAKA |
| | | ILSARLSKSRRLENLIAQLPGEKKNGLFGN |
| | | LIALSLGLTPNFKSNFDLAEDAKLQLSKDT |
| | | YDDDLDNLLAQIGDQYADLFLAAKNLSDAI |
| | | LLSDILRVNTEITKAPLSASMIKRYDEHHQ |
| | | DLTLLKALVRQQLPEKYKEIFFDQSKNGYA |
| | | GYIDGGASQEEFYKFIKPILEKMDGTEELL |
| | | VKLNREDLLRKQRTFDNGSIPHQIHLGELH |
| | | AILRRQEDFYPFLKDNREKIEKILTFRIPY |
| | | YVGPLARGNSRFAWMTRKSEETITPWNFEE |
| | | VVDKGASAQSFIERMTNFDKNLPNEKVLPK |
| | | HSLLYEYFTVYNELTKVKYVTEGMRKPAFL |
| | | SGEQKKAIVDLLFKTNRKVTVKQLKEDYFK |
| | | KIECFDSVEISGVEDRFNASLGTYHDLLKI |
| | | IKDKDFLDNEENEDILEDIVLTLTLFEDRE |
| | | MIEERLKTYAHLFDDKVMKQLKRRRYTGWG |
| | | RLSRKLINGIRDKQSGKTILDFLKSDGFAN |
| | | RNFMQLIHDDSLTFKEDIQKAQVSGQGDSL |
| | | HEHIANLAGSPAIKKGILQTVKVVDELVKV |
| | | MGRHKPENIVIEMARENQTTQKGQKNSRER |
| | | MKRIEEGIKELGSQILKEHPVENTQLQNEK |
| | | LYLYYLQNGRDMYVDQELDINRLSDYDVDH |
| | | IVPQSFLKDDSIDNKVLTRSDKNRGKSDNV |
| | | PSEEWKKMKNYWRQLLNAKLITQRKFDNLT |
| | | KAERGGLSELDKAGFIKRQLVETRQITKHV |
| | | AQILDSRMNTKYDENDKLIREVKVITLKSK |
| | | LVSDFRKDFQFYKVREINNYHHAHDAYLNA |
| | | WGTALIKKYPKLESEFVYGDYKVYDVRKMI |
| | | AKSEQEIGKATAKYFFYSNIMNFFKTEITL |
| | | ANGEIRKRPLIETNGETGEIVWDKGRDFAT |
| | | VRKVLSMPQVNIVKKTEVQTGGFSKESILP |
| | | KRNSDKLIARKKDWDPKKYGGFVSPTVAYS |
| | | VLVVAKVEKGKSKKLKSVKELLGITIMERS |
| | | SFEKNPIDFLEAKGYKEVKKDLIIKLPKYS |
| | | LFELENGRKRMLASARELQKGNELALPSKY |
| | | VNFLYLASHYEKLKGSPEDNEQKQLFVEQH |
| | | KHYLDEIIEQISEFSKRVILADANLDKVLS |
| | | AYNKHRDKPIREQAENIIHLFTLTNLGAPA |
| | | AFKYFDTTIDRKEYRSTKEVLDATLIHQSI |
| | | TGLYETRIDLSQLGGD |
| SpyMacCas9 | 1307 | MDKKYSIGLDIGTNSVGWAVITDDYKVPSK |
| polypeptide | | KFKVLGNTDRHSIKKNLIGALLFGSGETAE |
| sequence | | ATRLKRTARRRYTRRKNRICYLQEIFSNEM |
| | | AKVDDSFFHRLEESFLVEEDKKHERHPIFG |
| | | NIVDEVAYHEKYPTIYHLRKKLADSTDKAD |
| | | LRLIYLALAHMIKFRGHFLIEGDLNPDNSD |
| | | VDKLFIQLVQIYNQLFEENPINASRVDAKA |
| | | ILSARLSKSRRLENLIAQLPGEKRNGLFGN |
| | | LIALSLGLTPNFKSNFDLAEDAKLQLSKDT |
| | | YDDDLDNLLAQIGDQYADLFLAAKNLSDAI |
| | | LLSDILRVNSEITKAPLSASMIKRYDEHHQ |
| | | DLTLLKALVRQQLPEKYKEIFFDQSKNGYA |
| | | GYIDGGASQEEFYKFIKPILEKMDGTEELL |
| | | VKLNREDLLRKQRTFDNGSIPHQIHLGELH |
| | | AILRRQEDFYPFLKDNREKIEKILTFRIPY |
| | | YVGPLARGNSRFAWMTRKSEETITPWNFEE |
| | | WDKGASAQSFIERMTNFDKNLPNEKVLPKH |
| | | SLLYEYFTVYNELTKVKYVTEGMRKPAFLS |
| | | GEQKKAIVDLLFKTNRKVTVKQLKEDYFKK |
| | | IECFDSVEISGVEDRFNASLGAYHDLLKII |
| | | KDKDFLDNEENEDILEDIVLTLTLFEDRGM |
| | | IEERLKTYAHLFDDKVMKQLKRRRYTGWGR |
| | | LSRKLINGIRDKQSGKTILDFLKSDGFANR |
| | | NFMQLIHDDSLTFKEDIQKAQVSGQGHSLH |
| | | EQIANLAGSPAIKKGILQTVKIVDELVKVM |
| | | GHKPENIVIEMARENQTTQKGQKNSRERMK |
| | | RIEEGIKELGSQILKEHPVENTQLQNEKLY |
| | | LYYLQNGRDMYVDQELDINRLSDYDVDHIV |
| | | PQSFIKDDSIDNKVLTRSDKNRGKSDNVPS |
| | | EEWKKMKNYWRQLLNAKLITQRKFDNLTKA |
| | | ERGGLSELDKAGFIKRQLVETRQITKHVAQ |
| | | ILDSRMNTKYDENDKLIREVKVITLKSKLV |
| | | SDFRKDFQFYKVREINNYHHAHDAYLNAVV |
| | | GTALIKKYPKLESEFVYGDYKVYDVRKMIA |
| | | KSEQEIGKATAKYFFYSNIMNFFKTEITLA |
| | | NGEIRKRPLIETNGETGEIVWDKGRDFATV |
| | | RKVLSMPQVNIVKKTEIQTVGQNGGLFDDN |
| | | PKSPLEVTPSKLVPLKKELNPKKYGGYQKP |
| | | TTAYPVLLITDTKQLIPISVMNKKQFEQNP |
| | | VKFLRDRGYQQVGKNDFIKLPKYTLVDIGD |
| | | GIKRLWASSKEIHKGNQLVVSKKSQILLYH |
| | | AHHLDSDLSNDYLQNHNQQFDVLFNEIISF |
| | | SKKCKLGKEHIQKIENVYSNKKNSASIEEL |
| | | AESFIKLLGFTQLGATSPFNFLGVKLNQKQ |
| | | YKGKKDYILPCTEGTLIRQSITGLYETRVD |
| | | LSKIGED |
| CP5 | 257 | EIGKATAKYFFYSNIMNFFKTEITLANGEI |
| polypeptide | | RKRPLIETNGETGEIVWDKGRDFATVRKVL |
| sequence | | SMPQVNIVKKTEVQTGGFSKESILPKRNSD |
| | | KLIARKKDWDPKKYGGFMQPTVAYSVLVVA |
| | | KVEKGKSKKLKSVKELLGITIMERSSFEKN |
| | | PIDFLEAKGYKEVKKDLIIKLPKYSLFELE |
| | | NGRKRMLASAKFLQKGNELALPSKYVNFLY |
| | | LASHYEKLKGSPEDNEQKQLFVEQHKHYLD |
| | | EIIEQISEFSKRVILADANLDKVLSAYNKH |
| | | RDKPIREQAENIIHLFTLTNLGAPRAFKYF |
| | | DTTIARKEYRSTKEVLDATLIHQSITGLYE |
| | | TRIDLSQLGGDGGSGGSGGSGGSGGSGGSG |
| | | GMDKKYSIGLAIGTNSVGWAVITDEYKVPS |
| | | KKFKVLGNTDRHSIKKNLIGALLFDSGETA |
| | | EATRLKRTARRRYTRRKNRICYLQEIFSNE |
| | | MAKVDDSFFHRLEESFLVEEDKKHERHPIF |
| | | GNIVDEVAYHEKYPTIYHLRKKLVDSTDKA |
| | | DLRLIYLALAHMIKFRGHFLIEGDLNPDNS |
| | | DVDKLFIQLVQTYNQLFEENPINASGVDAK |
| | | AILSARLSKSRRLENLIAQLPGEKKNGLFG |
| | | NLIALSLGLTPNFKSNFDLAEDAKLQLSKD |
| | | TYDDDLDNLLAQIGDQYADLFLAAKNLSDA |
| | | ILLSDILRVNTEITKAPLSASMIKRYDEHH |
| | | QDLTLLKALVRQQLPEKYKEIFFDQSKNGY |
| | | AGYIDGGASQEEFYKFIKPILEKMDGTEEL |
| | | LVKLNREDLLRKQRTFDNGSIPHQIHLGEL |
| | | HAILRRQEDFYPFLKDNREKIEKILTFRIP |
| | | YYVGPLARGNSRFAWMTRKSEETITPWNFE |
| | | EVVDKGASAQSFIERMTNFDKNLPNEKVLP |
| | | KHSLLYEYFTVYNELTKVKYVTEGMRKPAF |
| | | LSGEQKKAIVDLLFKTNRKVTVKQLKEDYF |
| | | KKIECFDSVEISGVEDRFNASLGTYHDLLK |
| | | IIKDKDFLDNEENEDILEDIVLTLTLFEDR |
| | | EMIEERLKTYAHLFDDKVMKQLKRRRYTGW |
| | | GRLSRKLINGIRDKQSGKTILDFLKSDGFA |
| | | NRNFMQLIHDDSLTFKEDIQKAQVSGQGDS |
| | | LHEHIANLAGSPAIKKGILQTVKWDELVKV |
| | | MGRHKPENIVIEMARENQTTQKGQKNSRER |
| | | MKRIEEGIKELGSQILKEHPVENTQLQNEK |
| | | LYLYYLQNGRDMYVDQELDINRLSDYDVDH |
| | | IVPQSFLKDDSIDNKVLTRSDKNRGKSDNV |
| | | PSEEWKKMKNYWRQLLNAKLITQRKFDNLT |
| | | KAERGGLSELDKAGFIKRQLVETRQITKHV |
| | | AQILDSRMNTKYDENDKLIREVKVITLKSK |
| | | LVSDFRKDFQFYKVREINNYHHAHDAYLNA |
| | | VVGTALIKKYPKLESEFVYGDYKVYDVRKM |
| | | IAKSEQEGADKRTADGSEFESPKKKRKV |
| Cas12c1 | 266 | MQTKKTHLHLISAKASRKYRRTIACLSDTA |
| polypeptide | | KKDLERRKQSGAADPAQELSCLKTIKFKLE |
| sequence | | VPEGSKLPSFDRISQIYNALETIEKGSLSY |
| | | LLFALILSGFRIFPNSSAAKTFASSSCYKN |
| | | DQFASQIKEIFGEMVKNFIPSELESILKKG |
| | | RRKNNKDWTEENIKRVLNSEFGRKNSEGSS |
| | | ALFDSFLSKFSQELFRKFDSWNEVNKKYLE |
| | | AAELLDSMLASYGPFDSVCKMIGDSDSRNS |
| | | LPDKSTIAFTNNAEITVDIESSVMPYMAIA |
| | | ALLREYRQSKSKAAPVAYVQSHLTTTNGNG |
| | | LSWFFKFGLDLIRKAPVSSKQSTSDGSKSL |
| | | QELFSVPDDKLDGLKFIKEACEALPEASLL |
| | | CGEKGELLGYQDFRTSFAGHIDSWVANYVN |
| | | RLFELIELVNQLPESIKLPSILTQKNHNLV |
| | | ASLGLQEAEVSHSLELFEGLVKNVRQTLKK |
| | | LAGIDISSSPNEQDIKEFYAFSDVLNRLGS |
| | | IRNQIENAVQTAKKDKIDLESAIEWKEWKK |
| | | LKKLPKLNGLGGGVPKQQELLDKALESVKQ |
| | | IRHYQRIDFERVIQWAVNEHCLETVPKFLV |
| | | DAEKKKINKESSTDFAAKENAVRFLLEGIG |
| | | AAARGKTDSVSKAAYNWFVVNNFLAKKDLN |
| | | RYFINCQGCIYKPPYSKRRSLAFALRSDNK |
| | | DTIEVVWEKFETFYKEISKEIEKFNIFSQE |
| | | FQTFLHLENLRMKLLL |
| | | RRIQKPIPAEIAFFSLPQEYYDSLPPNVAF |
| | | LALNQEITPSEYITQFNLYSSFLNGNLILL |
| | | RRSRSYLRAKFSWVGNSKLIYAAKEARLWK |
| | | IPNAYWKSDEWKMILDSNVLVFDKAGNVLP |
| | | APTLKKVCEREGDLRLFYPLLRQLPHDWCY |
| | | RNPFVKSVGREKNVIEVNKEGEPKVASALP |
| | | GSLFRLIGPAPFKSLLDDCFFNPLDKDLRE |
| | | CMLIVDQEISQKVEAQKVEASLESCTYSIA |
| | | VPIRYHLEEPKVSNQFENVLAIDQGEAGLA |
| | | YAVFSLKSIGEAETKPIAVGTIRIPSIRRL |
| | | IHSVSTYRKKKQRLQNFKQNYDSTAFIMRE |
| | | NVTGDVCAKIVGLMKEFNAFPVLEYDVKNL |
| | | ESGSRQLSAVYKAVNSHFLYFKEPGRDALR |
| | | KQLWYGGDSWTIDGIEIVTRERKEDGKEGV |
| | | EKIVPLKVFPGRSVSARFTSKTCSCCGRNV |
| | | FDWLFTEKKAKTNKKFNVNSKGELTTADGV |
| | | IQLFEADRSKGPKFYARRKERTPLTKPIAK |
| | | GSYSLEEIERRVRTNLRRAPKSKQSRDTSQ |
| | | SQYFCVYKDCALHFSGMQADENAAINIGRR |
| | | FLTALRKNRRSDFPSNVKISDRLLDN |
| Cas12c2 | 267 | MTKHSIPLHAFRNSGADARKWKGRIALLAK |
| polypeptide | | RGKETMRTLQFPLEMSEPEAAAINTTPFAV |
| sequence | | AYNAIEGTGKGTLFDYWAKLHLAGFRFFPS |
| | | GGAATIFRQQAVFEDASWNAAFCQQSGKDW |
| | | PWLVPSKLYERFTKAPREVAKKDGSKKSIE |
| | | FTQENVANESHVSLVGASITDKTPEDQKEF |
| | | FLKMAGALAEKFDSWKSANEDRIVAMKVID |
| | | EFLKSEGLHLPSLENIAVKCSVETKPDNAT |
| | | VAWHDAPMSGVQNLAIGVFATCASRIDNIY |
| | | DLNGGKLSKLIQESATTPNVTALSWLFGKG |
| | | LEYFRTTDIDTIMQDFNIPASAKESIKPLV |
| | | ESAQAIPTMTVLGKKNYAPFRPNFGGKIDS |
| | | WIANYASRLMLLNDILEQIEPGFELPQALL |
| | | DNETLMSGIDMTGDELKELIEAVYAWVDAA |
| | | KQGLATLLGRGGNVDDAVQTFEQFSAMMDT |
| | | LNGTLNTISARYVRAVEMAGKDEARLEKLI |
| | | ECKFDIPKWCKSVPKLVGISGGLPKVEEEI |
| | | KVMNAAFKDVRARMFVRFEEIAAYVASKGA |
| | | GMDVYDALEKRELEQIKKLKSAVPERAHIQ |
| | | AYRAVLHRIGRAVQNCSEKTKQLFSSKVIE |
| | | MGVFKNPSHLNNFIFNQKGAIYRSPFDRSR |
| | | HAPYQLHADKLLKNDWLELLAEISATLMAS |
| | | ESTEQMEDALRLERTRLQLQLSGLPDWEYP |
| | | ASLAKPDIEVEIQTALKMQLAKDTVTSDVL |
| | | QRAFNLYSSVLSGLTFKLLRRSFSLKMRFS |
| | | VADTTQLIYVPKVCDWAIPKQYLQAEGEIG |
| | | IAARWTESSPAKMVTEVEMKEPKALGHFMQ |
| | | QAPHDWYFDASLGGTQVAGRIVEKGKEVGK |
| | | ERKLVGYRMRGNSAYKTVLDKSLVGNTELS |
| | | QCSMIIEIPYTQTVDADFRAQVQAGLPKVS |
| | | INLPVKETITASNKDEQMLFDRFVAIDLGE |
| | | RGLGYAVFDAKTLELQESGHRPIKAITNLL |
| | | NRTHHYEQRPNQRQKFQAKFNVNLSELREN |
| | | TVGDVCHQINRICAYYNAFPVLEYMVPDRL |
| | | DKQLKSVYESVTNRYIWSSTDAHKSARVQF |
| | | WLGGETWEHPYLKSAKDKKPLVLSPGRGAS |
| | | GKGTSQTCSCCGRNPFDLIKDMKPRAKIAV |
| | | VDGKAKLENSELKLFERNLESKDDMLARRH |
| | | RNERAGMEQPLTPGNYTVDEIKALLRANLR |
| | | RAPKNRRTKDTTVSEYHCVFSDCGKTMHAD |
| | | ENAAVNIGGKFIADIEK |
| OspCas12c | 268 | MTKLRHRQKKLTHDWAGSKKREVLGSNGKL |
| polypeptide | | QNPLLMPVKKGQVTEFRKAFSAYARATKGE |
| sequence | | MTDGRKNMFTHSFEPFKTKPSLHQCELADK |
| | | AYQSLHSYLPGSLAHFLLSAHALGFRIFSK |
| | | SGEATAFQASSKIEAYESKLASELACVDLS |
| | | IQNLTISTLFNALTTSVRGKGEETSADPLI |
| | | ARFYTLLTGKPLSRDTQGPERDLAEVISRK |
| | | IASSFGTWKEMTANPLQSLQFFEEELHALD |
| | | ANVSLSPAFDVLIKMNDLQGDLKNRTIVFD |
| | | PDAPVFEYNAEDPADIIIKLTARYAKEAVI |
| | | KNQNVGNYVKNAITTTNANGLGWLLNKGLS |
| | | LLPVSTDDELLEFIGVERSHPSCHALIELI |
| | | AQLEAPELFEKNVFSDTRSEVQGMIDSAVS |
| | | NHIARLSSSRNSLSMDSEELERLIKSFQIH |
| | | TPHCSLFIGAQSLSQQLESLPEALQSGVNS |
| | | ADILLGSTQYMLTNSLVEESIATYQRTLNR |
| | | INYLSGVAGQINGAIKRKAIDGEKIHLPAA |
| | | WSELISLPFIGQPVIDVESDLAHLKNQYQT |
| | | LSNEFDTLISALQKNFDLNFNKALLNRTQH |
| | | FEAMCRSTKKNALSKPEIVSYRDLLARLTS |
| | | CLYRGSLVLRRAGIEVLKKHKIFESNSELR |
| | | EHVHERKHFVFVSPLDRKAKKLLRLTDSRP |
| | | DLLHVIDEILQHDNLENKDRESLWLVRSGY |
| | | LLAGLPDQLSSSFINLPIITQKGDRRLIDL |
| | | IQYDQINRDAFVMLVTSAFKSNLSGLQYRA |
| | | NKQSFVVTRTLSPYLGSKLVYVPKDKDWLV |
| | | PSQMFEGRFADILQSDYMVWKDAGRLCVID |
| | | TAKHLSNIKKSVFSSEEVLAFLRELPHRTF |
| | | IQTEVRGLGVNVDGIAFNNGDIPSLKTFSN |
| | | CVQVKVSRTNTSLVQTLNRWFEGGKVSPPS |
| | | IQFERAYYKKDDQIHEDAAKRKIRFQMPAT |
| | | ELVHASDDAGWTPSYLLGIDPGEYGMGLSL |
| | | VSINNGEVLDSGFIHINSLINFASKKSNHQ |
| | | TKVVPRQQYKSPYANYLEQSKDSAAGDIAH |
| | | ILDRLIYKLNALPVFEALSGNSQSAADQVW |
| | | TKVLSFYTWGDNDAQNSIRKQHWFGASHWD |
| | | IKGMLRQPPTEKKPKPYIAFPGSQVSSYGN |
| | | SQRCSCCGRNPIEQLREMAKDTSIKELKIR |
| | | NSEIQLFDGTIKLFNPDPSTVIERRRHNLG |
| | | PSRIPVADRTFKNISPSSLEFKELITIVSR |
| | | SIRHSPEFIAKKRGIGSEYFCAYSDCNSSL |
| | | NSEANAAANVAQKFQKQLFFEL |
| Cas12g1 | 269 | MAQASSTPAVSPRPRPRYREERTLVRKLLP |
| polypeptide | | RPGQSKQEFRENVKKLRKAFLQFNADVSGV |
| sequence | | CQWAIQFRPRYGKPAEPTETFWKFFLEPET |
| | | SLPPNDSRSPEFRRLQAFEAAAGINGAAAL |
| | | DDPAFTNELRDSILAVASRPKTKEAQRLFS |
| | | RLKDYQPAHRMILAKVAAEWIESRYRRAHQ |
| | | NWERNYEEWKKEKQEWEQNHPELTPEIREA |
| | | FNQIFQQLEVKEKRVRICPAARLLQNKDNC |
| | | QYAGKNKHSVLCNQFNEFKKNHLQGKAIKF |
| | | FYKDAEKYLRCGLQSLKPNVQGPFREDWNK |
| | | YLRYMNLKEETLRGKNGGRLPHCKNLGQEC |
| | | EFNPHTALCKQYQQQLSSRPDLVQHDELYR |
| | | KWRREYWREPRKPVFRYPSVKRHSIAKIFG |
| | | ENYFQADFKNSVVGLRLDSMPAGQYLEFAF |
| | | APWPRNYRPQPGETEISSVHLHFVGTRPRI |
| | | GFRFRVPHKRSRFDCTQEELDELRSRTFPR |
| | | KAQDQKFLEAARKRLLETFPGNAEQELRLL |
| | | AVDLGTDSARAAFFIGKTFQQAFPLKIVKI |
| | | EKLYEQWPNQKQAGDRRDASSKQPRPGLSR |
| | | DHVGRHLQKMRAQASEIAQKRQELTGTPAP |
| | | ETTTDQAAKKATLQPFDLRGLTVHTARMIR |
| | | DWARLNARQIIQLAEENQVDLIVLESLRGF |
| | | RPPGYENLDQEKKRRVAFFAHGRIRRKVTE |
| | | KAVERGMRVVTVPYLASSKVCAECRKKQKD |
| | | NKQWEKNKKRGLFKCEGCGSQAQVDENAAR |
| | | VLGRVFWGEIELPTAIP |
| Cas12h1 | 270 | MKVHEIPRSQLLKIKQYEGSFVEWYRDLQE |
| polypeptide | | DRKKFASLLFRWAAFGYAAREDDGATYISP |
| sequence | | SQALLERRLLLGDAEDVAIKFLDVLFKGGA |
| | | PSSSCYSLFYEDFALRDKAKYSGAKREFIE |
| | | GLATMPLDKIIERIRQDEQLSKIPAEEWLI |
| | | LGAEYSPEEIWEQVAPRIVNVDRSLGKQLR |
| | | ERLGIKCRRPHDAGYCKILMEVVARQLRSH |
| | | NETYHEYLNQTHEMKTKVANNLTNEFDLVC |
| | | EFAEVLEEKNYGLGWYVLWQGVKQALKEQK |
| | | KPTKIQIAVDQLRQPKFAGLLTAKWRALKG |
| | | AYDTWKLKKRLEKRKAFPYMPNWDNDYQIP |
| | | VGLTGLGVFTLEVKRTEVWDLKEHGKLFCS |
| | | HSHYFGDLTAEKHPSRYHLKFRHKLKLRKR |
| | | DSRVEPTIGPWIEAALREITIQKKPNGVFY |
| | | LGLPYALSHGIDNFQIAKRFFSAAKPDKEV |
| | | INGLPSEMWGAADLNLSNIVAPVKARIGKG |
| | | LEGPLHALDYGYGELIDGPKILTPDGPRCG |
| | | ELISLKRDIVEIKSAIKEFKACQREGLTMS |
| | | EETTTWLSEVESPSDSPRCMIQSRIADTSR |
| | | RLNSFKYQMNKEGYQDLAEALRLLDAMDSY |
| | | NSLLESYQRMHLSPGEQSPKEAKFDTKRAS |
| | | FRDLLRRRVAHTIVEYFDDCDIVFFEDLDG |
| | | PSDSDSRNNALVKLLSPRTLLLYIRQALEK |
| | | RGIGMVEVAKDGTSQNNPISGHVGWRNKQN |
| | | KSEIYFYEDKELLVMDADEVGAMNILCRGL |
| | | NHSVCPYSFVTKAPEKKNDEKKEGDYGKRV |
| | | KRFLKDRYGSSNVRFLVASMGFVTVTTKRP |
| | | KDALVGKRLYYHGGELVTHDLHNRMKDEIK |
| | | YLVEKEVLARRVSLSDSTIKSYKSFAHV |
| Cas12i1 | 271 | MSNKEKNASETRKAYTTKMIPRSHDRMKLL |
| polypeptide | | GNFMDYLMDGTPIFFELWNQFGGGIDRDII |
| sequence | | SGTANKDKISDDLLLAVNWFKVMPINSKPQ |
| | | GVSPSNLANLFQQYSGSEPDIQAQEYFASN |
| | | FDTEKHQWKDMRVEYERLLAELQLSRSDMH |
| | | HDLKLMYKEKCIGLSLSTAHYITSVMFGTG |
| | | AKNNRQTKHQFYSKVIQLLEESTQINSVEQ |
| | | LASIILKAGDCDSYRKLRIRCSRKGATPSI |
| | | LKIVQDYELGTNHDDEVNVPSLIANLKEKL |
| | | GRFEYECEWKCMEKIKAFLASKVGPYYLGS |
| | | YSAMLENALSPIKGMTTKNCKFVLKQIDAK |
| | | NDIKYENEPFGKIVEGFFDSPYFESDTNVK |
| | | WVLHPHHIGESNIKTLWEDLNAIHSKYEED |
| | | IASLSEDKKEKRIKVYQGDVCQTINTYCEE |
| | | VGKEAKTPLVQLLRYLYSRKDDIAVDKIID |
| | | GITFLSKKHKVEKQKINPVIQKYPSFNFGN |
| | | NSKLLGKIISPKDKLKHNLKCNRNQVDNYI |
| | | WIEIKVLNTKTMRWEKHHYALSSTRFLEEV |
| | | YYPATSENPPDALAARFRTKTNGYEGKPAL |
| | | SAEQIEQIRSAPVGLRKVKKRQMRLEAARQ |
| | | QNLLPRYTWGKDFNINICKRGNNFEVTLAT |
| | | KVKKKKEKNYKVVLGYDANIVRKNTYAAIE |
| | | AHANGDGVIDYNDLPVKPIESGFVTVESQV |
| | | RDKSYDQLSYNGVKLLYCKPHVESRRSFLE |
| | | KYRNGTMKDNRGNNIQIDFMKDFEAIADDE |
| | | TSLYYFNMKYCKLLQSSIRNHSSQAKEYRE |
| | | EIFELLRDGKLSVLKLSSLSNLSFVMFKVA |
| | | KSLIGTYFGHLLKKPKNSKSDVKAPPITDE |
| | | DKQKADPEMFALRLALEEKRLNKVKSKKEV |
| | | IANKIVAKALELRDKYGPVLIKGENISDTT |
| | | KKGKKSSTNSFLMDWLARGVANKVKEMVMM |
| | | HQGLEFVEVNPNFTSHQDPFVHKNPENTFR |
| | | ARYSRCTPSELTEKNRKEILSFLSDKPSKR |
| | | PTNAYYNEGAMAFLATYGLKKNDVLGVSLE |
| | | KFKQIMANILHQRSEDQLLFPSRGGMFYLA |
| | | TYKLDADATSVNWNGKQFWVCNADLVAAYN |
| | | VGLVDIQKDFKKK |
| Cas12i2 | 272 | MSSAIKSYKSVLRPNERKNQLLKSTIQCLE |
| polypeptide | | DGSAFFFKMLQGLFGGITPEIVRFSTEQEK |
| sequence | | QQQDIALWCAVNWFRPVSQDSLTHTIASDN |
| | | LVEKFEEYYGGTASDAIKQYFSASIGESYY |
| | | WNDCRQQYYDLCRELGVEVSDLTHDLEILC |
| | | REKCLAVATESNQNNSIISVLFGTGEKEDR |
| | | SVKLRITKKILEAISNLKEIPKNVAPIQEI |
| | | ILNVAKATKETFRQVYAGNLGAPSTLEKFI |
| | | AKDGQKEFDLKKLQTDLKKVIRGKSKERDW |
| | | CCQEELRSYVEQNTIQYDLWAWGEMFNKAH |
| | | TALKIKSTRNYNFAKQRLEQFKEIQSLNNL |
| | | LWKKLNDFFDSEFFSGEETYTICVHHLGGK |
| | | DLSKLYKAWEDDPADPENAIVVLCDDLKNN |
| | | FKKEPIRNILRYIFTIRQECSAQDILAAAK |
| | | YNQQLDRYKSQKANPSVLGNQGFTWTNAVI |
| | | LPEKAQRNDRPNSLDLRIWLYLKLRHPDGR |
| | | WKKHHIPFYDTRFFQEIYAAGNSPVDTCQF |
| | | RTPRFGYHLPKLTDQTAIRVNKKHVKAAKT |
| | | EARIRLAIQQGTLPVSNLKITEISATINSK |
| | | GQVRIPVKFDVGRQKGTLQIGDRFCGYDQN |
| | | QTASHAYSLWEVVKEGQYHKELGCFVRFIS |
| | | SGDIVSITENRGNQFDQLSYEGLAYPQYAD |
| | | WRKKASKFVSLWQITKKNKKKEIVTVEAKE |
| | | KFDAICKYQPRLYKFNKEYAYLLRDIVRGK |
| | | SLVELQQIRQEIFRFIEQDCGVTRLGSLSL |
| | | STLETVKAVKGIIYSYFSTALNASKNNPIS |
| | | DEQRKEFDPELFALLEKLELIRTRKKKQKV |
| | | ERIANSLIQTCLENNIKFIRGEGDLSTTNN |
| | | ATKKKANSRSMDWLARGVFNKIRQLAPMHN |
| | | ITLFGCGSLYTSHQDPLVHRNPDKAMKCRW |
| | | AAIPVKDIGDWVLRKLSQNLRAKNIGTGEY |
| | | YHQGVKEFLSHYELQDLEEELLKWRSDRKS |
| | | NIPCWVLQNRLAEKLGNKEAWYIPVRGGRI |
| | | YFATHKVATGAVSIVFDQKQVWVCNADHVA |
| | | AANIALTVKGIGEQSSDEENPDGSRIKLQL |
| | | TS |
| Linker | 1308 | (GGGS)N |
| Linker | 109 | (GGGGS)N |
| Linker | 1309 | (EAAAK)N |
| Linker | 56 | SGSETPGTSESATPES |
| | 57 | (SGGS)N |
| Linker | 273 | GGSGGS |
| Linker | 1310 | GSSGSETPGTSESATPESSG |
| Linker | 1311 | GGAGGCTCTGGAGGAAGC |
| Linker | 1312 | GGCTCTTCTGGATCTGAAACACCTGGCACA |
| | | AGCGAGAGCGCCACCCCTGAGAGCTCTGGC |
| AacCas12b | 259 | MAVKSMKVKLRLDNMPEIRAGLWKLHTEVN |
| polypeptide | | AGVRYYTEWLSLLRQENLYRRSPNGDGEQE |
| sequence | | CYKTAEECKAELLERLRARQVENGHCGPAG |
| | | SDDELLQLARQLYELLVPQAIGAKGDAQQI |
| | | ARKFLSPLADKDAVGGLGIAKAGNKPRWVR |
| | | MREAGEPGWEEEKAKAEARKSTDRTADVLR |
| | | ALADFGLKPLMRVYTDSDMSSVQWKPLRKG |
| | | QAVRTWDRDMFQQAIERMMSWESWNQRVGE |
| | | AYAKLVEQKSRFEQKNFVGQEHLVQLVNQL |
| | | QQDMKEASHGLESKEQTAHYLTGRALRGSD |
| | | KVFEKWEKLDPDAPFDLYDTEIKNVQRRNT |
| | | RRFGSHDLFAKLAEPKYQALWREDASFLTR |
| | | YAVYNSIVRKLNHAKMFATFTLPDATAHPI |
| | | WTRFDKLGGNLHQYTFLFNEFGEGRHAIRF |
| | | QKLLTVEDGVAKEVDDVTVPISMSAQLDDL |
| | | LPRDPHELVALYFQDYGAEQHLAGEFGGAK |
| | | IQYRRDQLNHLHARRGARDVYLNLSVRVQS |
| | | QSEARGERRPPYAAVFRLVGDNHRAFVHFD |
| | | KLSDYLAEHPDDGKLGSEGLLSGLRVMSVD |
| | | LGLRTSASISVFRVARKDELKPNSEGRVPF |
| | | CFPIEGNENLVAVHERSQLLKLPGETESKD |
| | | LRAIREERQRTLRQLRTQLAYLRLLVRCGS |
| | | EDVGRRERSWAKLIEQPMDANQMTPDWREA |
| | | FEDELQKLKSLYGICGDREWTEAVYESVRR |
| | | VWRHMGKQVRDWRKDVRSGERPKIRGYQKD |
| | | VVGGNSIEQIEYLERQYKFLKSWSFFGKVS |
| | | GQVIRAEKGSRFAITLREHIDHAKEDRLKK |
| | | LADRIIMEALGYVYALDDERGKGKWVAKYP |
| | | PCQLILLEELSEYQFNNDRPPSENNQLMQW |
| | | SHRGVFQELLNQAQVHDLLVGTMYAAFSSR |
| | | FDARTGAPGIRCRRVPARCAREQNPEPFPW |
| | | WLNKFVAEHKLDGCPLRADDLIPTGEGEFF |
| | | VSPFSAEEGDFHQIHADLNAAQNLQRRLWS |
| | | DFDISQIRLRCDWGEVDGEPVLIPRTTGKR |
| | | TADSYGNKVFYTKTGVTYYERERGKKRRKV |
| | | FAQEELSEEEAELLVEADEAREKSVVLMRD |
| | | PSGIINRGDWTRQKEFWSMVNQRIEGYLVK |
| | | QIRSRVRLQESACENTGDI |
| BhCas12b | 260 | MAPKKKRKVGIHGVPAAATRSFILKIEPNE |
| polypeptide | | EVKKGLWKTHEVLNHGIAYYMNILKLIRQE |
| sequence | | AIYEHHEQDPKNPKKVSKAEIQAELWDFVL |
| | | KMQKCNSFTHEVDKDEVFNILRELYEELVP |
| | | SSVEKKGEANQLSNKFLYPLVDPNSQSGKG |
| | | TASSGRKPRWYNLKIAGDPSWEEEKKKWEE |
| | | DKKKDPLAKILGKLAEYGLIPLFIPYTDSN |
| | | EPIVKEIKWMEKSRNQSVRRLDKDMFIQAL |
| | | ERFLSWESWNLKVKEEYEKVEKEYKTLEER |
| | | IKEDIQALKALEQYEKERQEQLLRDTLNTN |
| | | EYRLSKRGLRGWREIIQKWLKMDENEPSEK |
| | | YLEVFKDYQRKHPREAGDYSVYEFLSKKEN |
| | | HFIWRNHPEYPYLYATFCEIDKKKKDAKQQ |
| | | ATFTLADPINHPLWVRFEERSGSNLNKYRI |
| | | LTEQLHTEKLKKKLTVQLDRLIYPTESGGW |
| | | EEKGKVDIVLLPSRQFYNQIFLDIEEKGKH |
| | | AFTYKDESIKFPLKGTLGGARVQFDRDHLR |
| | | RYPHKVESGNVGRIYFNMTVNIEPTESPVS |
| | | KSLKIHRDDFPKVVNFKPKELTEWIKDSKG |
| | | KKLKSGIESLEIGLRVMSIDLGQRQAAAAS |
| | | IFEVVDQKPDIEGKLFFPIKGTELYAVHRA |
| | | SFNIKLPGETLVKSREVLRKAREDNLKLMN |
| | | QKLNFLRNVLHFQQFEDITEREKRVTKWIS |
| | | RQENSDVPLVYQDELIQIRELMYKPYKDWV |
| | | AFLKQLHKRLEVEIGKEVKHWRKSLSDGRK |
| | | GLYGISLKNIDEIDRTRKFLLRWSLRPTEP |
| | | GEVRRLEPGQRFAIDQLNHLNALKEDRLKK |
| | | MANTIIMHALGYCYDVRKKKWQAKNPACQI |
| | | ILFEDLSNYNPYEERSRFENSKLMKWSRRE |
| | | IPRQVALQGEIYGLQVGEVGAQFSSRFHAK |
| | | TGSPGIRCSWTKEKLQDNRFFKNLQREGRL |
| | | TLDKIAVLKEGDLYPDKGGEKFISLSKDRK |
| | | CVTTHADINAAQNLQKRFWTRTHGFYKVYC |
| | | KAYQVDGQTVYIPESKDQKQKIIEEFGEGY |
| | | FILKDGVYEWVNAGKLKIKKGSSKQSSSEL |
| | | VDSDILKDSFDLASELKGEKLMLYRDPSGN |
| | | VFPSDKWMAAGVFFGKLERILISKLTNQYS |
| | | ISTIEDDSSKQSMKRPAATKKAGQAKKKK |
| BvCas12b | 264 | MAIRSIKLKMKTNSGTDSIYLRKALWRTHQ |
| (Bacillus | | LINEGIAYYMNLLTLYRQEAIGDKTKEAYQ |
| sp. V3-13) | | AELINIIRNQQRNNGSSEEHGSDQEILALL |
| poly- | | RQLYELIIPSSIGESGDANQLGNKFLYPLV |
| nucleotide | | DPNSQSGKGTSNAGRKPRWKRLKEEGNPDW |
| sequence | | ELEKKKDEERKAKDPTVKIFDNLNKYGLLP |
| | | LFPLFTNIQKDIEWLPLGKRQSVRKWDKDM |
| | | FIQAIERLLSWESWNRRVADEYKQLKEKTE |
| | | SYYKEHLTGGEEWIEKIRKFEKERNMELEK |
| | | NAFAPNDGYFITSRQIRGWDRVYEKWSKLP |
| | | ESASPEELWKWAEQQNKMSEGFGDPKVFSF |
| | | LANRENRDIWRGHSERIYHIAAYNGLQKKL |
| | | SRTKEQATFTLPDAIEHPLWIRYESPGGTN |
| | | LNLFKLEEKQKKNYYVTLSKIIWPSEEKWI |
| | | EKENIEIPLAPSIQFNRQIKLKQHVKGKQE |
| | | ISFSDYSSRISLDGVLGGSRIQFNRKYIKN |
| | | HKELLGEGDIGPVFFNLWDVAPLQETRNGR |
| | | LQSPIGKALKVISSDFSKVIDYKPKELMDW |
| | | MNTGSASNSFGVASLLEGMRVMSIDMGQRT |
| | | SASVSIFEVVKELPKDQEQKLFYSINDTEL |
| | | FAIHKRSFLLNLPGEVVTKNNKQQRQERRK |
| | | KRQFVRSQIRMLANVLRLETKKTPDERKKA |
| | | IHKLMEIVQSYDSWTASQKEVWEKELNLLT |
| | | NMAAFNDEIWKESLVELHHRIEPYVGQIVS |
| | | KWRKGLSEGRKNLAGISMWNIDELEDTRRL |
| | | LISWSKRSRTPGEANRIETDEPFGSSLLQH |
| | | IQNVKDDRLKQMANLIIMTALGFKYDKEEK |
| | | DRYKRWKETYPACQIILFENLNRYLFNLDR |
| | | SRRENSRLMKWAHRSIPRTVSMQGEMFGLQ |
| | | VGDVRSEYSSRFHAKTGAPGIRCHALTEED |
| | | LKAGSNTLKRLIEDGFINESELAYLKKGDI |
| | | IPSQGGELFVTLSKRYKKDSDNNELTVIHA |
| | | DINAAQNLQKRFWQQNSEVYRVPCQLARMG |
| | | EDKLYIPKSQTETIKKYFGKGSFVKNNTEQ |
| | | EVYKWEKSEKMKIKTDTTFDLQDLDGFEDI |
| | | SKTIELAQEQQKKYLTMFRDPSGYFFNNET |
| | | WRPQKEYWSIVNNIIKSCLKKKILSNKVEL |
| BTCas12b. | 265 | MATRSFILKIEPNEEVKKGLWKTHEVLNHG |
| BTCas1 | | IAYYMNILKLIRQEAIYEHHEQDPKNPKKV |
| 2b | | SKAEIQAELWDFVLKMQKCNSFTHEVDKDV |
| polypeptide | | VFNILRELYEELVPSSVEKKGEANQLSNKF |
| sequence | | LYPLVDPNSQSGKGTASSGRKPRWYNLKIA |
| | | GDPSWEEEKKKWEEDKKKDPLAKILGKLAE |
| | | YGLIPLFIPFTDSNEPIVKEIKWMEKSRNQ |
| | | SVRRLDKDMFIQALERFLSWESWNLKVKEE |
| | | YEKVEKEHKTLEERIKEDIQAFKSLEQYEK |
| | | ERQEQLLRDTLNTNEYRLSKRGLRGWREII |
| | | QKWLKMDENEPSEKYLEVFKDYQRKHPREA |
| | | GDYSVYEFLSKKENHFIWRNHPEYPYLYAT |
| | | FCEIDKKKKDAKQQATFTLADPINHPLWVR |
| | | FEERSGSNLNKYRILTEQLHTEKLKKKLTV |
| | | QLDRLIYPTESGGWEEKGKVDIVLLPSRQF |
| | | YNQIFLDIEEKGKHAFTYKDESIKFPLKGT |
| | | LGGARVQFDRDHLRRYPHKVESGNVGRIYF |
| | | NMTVNIEPTESPVSKSLKIHRDDFPKFVNF |
| | | KPKELTEWIKDSKGKKLKSGIESLEIGLRV |
| | | MSIDLGQRQAAAASIFEWDQKPDIEGKLFF |
| | | PIKGTELYAVHRASFNIKLPGETLVKSREV |
| | | LRKAREDNLKLMNQKLNFLRNVLHFQQFED |
| | | ITEREKRVTKWISRQENSDVPLVYQDELIQ |
| | | IRELMYKPYKDWVAFLKQLHKRLEVEIGKE |
| | | VKHWRKSLSDGRKGLYGISLKNIDEIDRTR |
| | | KFLLRWSLRPTEPGEVRRLEPGQRFAIDQL |
| | | NHLNALKEDRLKKMANTIIMHALGYCYDVR |
| | | KKKWQAKNPACQIILFEDLSNYNPYEERSR |
| | | FENSKLMKWSRREIPRQVALQGEIYGLQVG |
| | | EVGAQFSSRFHAKTGSPGIRCSVVTKEKLQ |
| | | DNRFFKNLQREGRLTLDKIAVLKEGDLYPD |
| | | KGGEKFISLSKDRKLVTTHADINAAQNLQK |
| | | RFWTRTHGFYKVYCKAYQVDGQTVYIPESK |
| | | DQKQKIIEEFGEGYFILKDGVYEWGNAGKL |
| | | KIKKGSSKQSSSELVDSDILKDSFDLASEL |
| | | KGEKLMLYRDPSGNVFPSDKWMAAGVFFGK |
| | | LERILISKLTNQYSISTIEDDSSKQSM |
| 5′UTR | 261 | GGGAAATAAGAGAGAAAAGAAGAGTAAGAA |
| | | GAAATATAAGAGCCACC |
| 3′UTR | 262 | GCTGGAGCCTCGGTGGCCATGCTTCTTGCC |
| (TriLink | | CCTTGGGCCTCCCCCCAGCCCCTCCTCCCC |
| standard | | TTCCTGCACCCGTACCCCCGTGGTCTTTGA |
| UTR) | | ATAAAGTCTGA |
| bhCas12b | 263 | ATGGCCCCAAAGAAGAAGCGGAAGGTCGGT |
| (V4) | | ATCCACGGAGTCCCAGCAGCCGCCACCAGA |
| poly- | | TCCTTCATCCTGAAGATCGAGCCCAACGAG |
| nucleotide | | GAAGTGAAGAAAGGCCTCTGGAAAACCCAC |
| sequence | | GAGGTGCTGAACCACGGAATCGCCTACTAC |
| | | ATGAATATCCTGAAGCTGATCCGGCAAGAG |
| | | GCCATCTACGAGCACCACGAGCAGGACCCC |
| | | AAGAATCCCAAGAAGGTGTCCAAGGCCGAG |
| | | ATCCAGGCCGAGCTGTGGGATTTCGTGCTG |
| | | AAGATGCAGAAGTGCAACAGCTTCACACAC |
| | | GAGGTGGACAAGGACGAGGTGTTCAACATC |
| | | CTGAGAGAGCTGTACGAGGAACTGGTGCCC |
| | | AGCAGCGTGGAAAAGAAGGGCGAAGCCAAC |
| | | CAGCTGAGCAACAAGTTTCTGTACCCTCTG |
| | | GTGGACCCCAACAGCCAGTCTGGAAAGGGA |
| | | ACAGCCAGCAGCGGCAGAAAGCCCAGATGG |
| | | TACAACCTGAAGATTGCCGGCGATCCCTCC |
| | | TGGGAAGAAGAGAAGAAGAAGTGGGAAGAA |
| | | GATAAGAAAAAGGACCCGCTGGCCAAGATC |
| | | CTGGGCAAGCTGGCTGAGTACGGACTGATC |
| | | CCTCTGTTCATCCCCTACACCGACAGCAAC |
| | | GAGCCCATCGTGAAAGAAATCAAGTGGATG |
| | | GAAAAGTCCCGGAACCAGAGCGTGCGGCGG |
| | | CTGGATAAGGACATGTTCATTCAGGCCCTG |
| | | GAACGGTTCCTGAGCTGGGAGAGCTGGAAC |
| | | CTGAAAGTGAAAGAGGAATACGAGAAGGTC |
| | | GAGAAAGAGTACAAGACCCTGGAAGAGAGG |
| | | ATCAAAGAGGACATCCAGGCTCTGAAGGCT |
| | | CTGGAACAGTATGAGAAAGAGCGGCAAGAA |
| | | CAGCTGCTGCGGGACACCCTGAACACCAAC |
| | | GAGTACCGGCTGAGCAAGAGAGGCCTTAGA |
| | | GGCTGGCGGGAAATCATCCAGAAATGGCTG |
| | | AAAATGGACGAGAACGAGCCCTCCGAGAAG |
| | | TACCTGGAAGTGTTCAAGGACTACCAGCGG |
| | | AAGCACCCTAGAGAGGCCGGCGATTACAGC |
| | | GTGTACGAGTTCCTGTCCAAGAAAGAGAAC |
| | | CACTTCATCTGGCGGAATCACCCTGAGTAC |
| | | CCCTACCTGTACGCCACCTTCTGCGAGATC |
| | | GACAAGAAAAAGAAGGACGCCAAGCAGCAG |
| | | GCCACCTTCACACTGGCCGATCCTATCAAT |
| | | CACCCTCTGTGGGTCCGATTCGAGGAAAGA |
| | | AGCGGCAGCAACCTGAACAAGTACAGAATC |
| | | CTGACCGAGCAGCTGCACACCGAGAAGCTG |
| | | AAGAAAAAGCTGACAGTGCAGCTGGACCGG |
| | | CTGATCTACCCTACAGAATCTGGCGGCTGG |
| | | GAAGAGAAGGGCAAAGTGGACATTGTGCTG |
| | | CTGCCCAGCCGGCAGTTCTACAACCAGATC |
| | | TTCCTGGACATCGAGGAAAAGGGCAAGCAC |
| | | GCCTTCACCTACAAGGATGAGAGCATCAAG |
| | | TTCCCTCTGAAGGGCACACTCGGCGGAGCC |
| | | AGAGTGCAGTTCGACAGAGATCACCTGAGA |
| | | AGATACCCTCACAAGGTGGAAAGCGGCAAC |
| | | GTGGGCAGAATCTACTTCAACATGACCGTG |
| | | AACATCGAGCCTACAGAGTCCCCAGTGTCC |
| | | AAGTCTCTGAAGATCCACCGGGACGACTTC |
| | | CCCAAGGTGGTCAACTTCAAGCCCAAAGAA |
| | | CTGACCGAGTGGATCAAGGACAGCAAGGGC |
| | | AAGAAACTGAAGTCCGGCATCGAGTCCCTG |
| | | GAAATCGGCCTGAGAGTGATGAGCATCGAC |
| | | CTGGGACAGAGACAGGCCGCTGCCGCCTCT |
| | | ATTTTCGAGGTGGTGGATCAGAAGCCCGAC |
| | | ATCGAAGGCAAGCTGTTTTTCCCAATCAAG |
| | | GGCACCGAGCTGTATGCCGTGCACAGAGCC |
| | | AGCTTCAACATCAAGCTGCCCGGCGAGACA |
| | | CTGGTCAAGAGCAGAGAAGTGCTGCGGAAG |
| | | GCCAGAGAGGACAATCTGAAACTGATGAAC |
| | | CAGAAGCTCAACTTCCTGCGGAACGTGCTG |
| | | CACTTCCAGCAGTTCGAGGACATCACCGAG |
| | | AGAGAGAAGCGGGTCACCAAGTGGATCAGC |
| | | AGACAAGAGAACAGCGACGTGCCCCTGGTG |
| | | TACCAGGATGAGCTGATCCAGATCCGCGAG |
| | | CTGATGTACAAGCCTTACAAGGACTGGGTC |
| | | GCCTTCCTGAAGCAGCTCCACAAGAGACTG |
| | | GAAGTCGAGATCGGCAAAGAAGTGAAGCAC |
| | | TGGCGGAAGTCCCTGAGCGACGGAAGAAAG |
| | | GGCCTGTACGGCATCTCCCTGAAGAACATC |
| | | GACGAGATCGATCGGACCCGGAAGTTCCTG |
| | | CTGAGATGGTCCCTGAGGCCTACCGAACCT |
| | | GGCGAAGTGCGTAGACTGGAACCCGGCCAG |
| | | AGATTCGCCATCGACCAGCTGAATCACCTG |
| | | AACGCCCTGAAAGAAGATCGGCTGAAGAAG |
| | | ATGGCCAACACCATCATCATGCACGCCCTG |
| | | GGCTACTGCTACGACGTGCGGAAGAAGAAA |
| | | TGGCAGGCTAAGAACCCCGCCTGCCAGATC |
| | | ATCCTGTTCGAGGATCTGAGCAACTACAAC |
| | | CCCTACGAGGAAAGGTCCCGCTTCGAGAAC |
| | | AGCAAGCTCATGAAGTGGTCCAGACGCGAG |
| | | ATCCCCAGACAGGTTGCACTGCAGGGCGAG |
| | | ATCTATGGCCTGCAAGTGGGAGAAGTGGGC |
| | | GCTCAGTTCAGCAGCAGATTCCACGCCAAG |
| | | ACAGGCAGCCCTGGCATCAGATGTAGCGTC |
| | | GTGACCAAAGAGAAGCTGCAGGACAATCGG |
| | | TTCTTCAAGAATCTGCAGAGAGAGGGCAGA |
| | | CTGACCCTGGACAAAATCGCCGTGCTGAAA |
| | | GAGGGCGATCTGTACCCAGACAAAGGCGGC |
| | | GAGAAGTTCATCAGCCTGAGCAAGGATCGG |
| | | AAGTGCGTGACCACACACGCCGACATCAAC |
| | | GCCGCTCAGAACCTGCAGAAGCGGTTCTGG |
| | | ACAAGAACCCACGGCTTCTACAAGGTGTAC |
| | | TGCAAGGCCTACCAGGTGGACGGCCAGACC |
| | | GTGTACATCCCTGAGAGCAAGGACCAGAAG |
| | | CAGAAGATCATCGAAGAGTTCGGCGAGGGC |
| | | TACTTCATTCTGAAGGACGGGGTGTACGAA |
| | | TGGGTCAACGCCGGCAAGCTGAAAATCAAG |
| | | AAGGGCAGCTCCAAGCAGAGCAGCAGCGAG |
| | | CTGGTGGATAGCGACATCCTGAAAGACAGC |
| | | TTCGACCTGGCCTCCGAGCTGAAAGGCGAA |
| | | AAGCTGATGCTGTACAGGGACCCCAGCGGC |
| | | AATGTGTTCCCCAGCGACAAATGGATGGCC |
| | | GCTGGCGTGTTCTTCGGAAAGCTGGAACGC |
| | | ATCCTGATCAGCAAGCTGACCAACCAGTAC |
| | | TCCATCAGCACCATCGAGGACGACAGCAGC |
| | | AAGCAGTCTATGAAAAGGCCGGCGGCCACG |
| | | AAAAAGGCCGGCCAGGCAAAAAAGAAAAAG |
| NLS | 1313 | MAPKKKRKVGTHGVPAA |
| NLS | 1314 | ATGGCCCCAAAGAAGAAGCGGAAGGTCGGT |
| | | ATCCACGGAGTCCCAGCAGCC |
| 101 Cas9 | 1315 | MDKKYSTGLATGTNSVGWAVTTDEYKVPSK |
| TadAins | | KFKVLGNTDRHSTKKNLTGALLFDSGETAE |
| 1015 | | ATRLKRTARRRYTRRKNRTCYLQETFSNEM |
| polypeptide | | AKVDDSFFHRLEESFLVEEDKKHERHPTFG |
| sequence | | NTVDEVAYHEKYPTTYHLRKKLVDSTDKAD |
| | | LRLTYLALAHMTKFRGHFLTEGDLNPDNSD |
| | | VDKLFTQLVQTYNQLFEENPTNASGVDAKA |
| | | TLSARLSKSRRLENLTAQLPGEKKNGLFGN |
| | | LTALSLGLTPNFKSNFDLAEDAKLQLSKDT |
| | | YDDDLDNLLAQTG |
| | | DQYADLFLAAKNLSDAILLSDILRVNTEIT |
| | | KAPLSASMIKRYDEHHQDLTLLKALVRQQL |
| | | PEKYKEIFFDQSKNGYAGYIDGGASQEEFY |
| | | KFIKPILEKMDGTEELLVKLNREDLLRKQR |
| | | TFDNGSIPHQIHLGELHAILRRQEDFYPFL |
| | | KDNREKIEKILTFRIPYYVGPLARGNSRFA |
| | | WMTRKSEETITPWNFEEVVDKGASAQSFIE |
| | | RMTNFDKNLPNEKVLPKHSLLYEYFTVYNE |
| | | LTKVKYVTEGMRKPAFLSGEQKKAIVDLLF |
| | | KTNRKVTVKQLKEDYFKKIECFDSVEISGV |
| | | EDRFNASLGTYHDLLKIIKDKDFLDNEENE |
| | | DILEDIVLTLTLFEDREMIEERLKTYAHLF |
| | | DDKVMKQLKRRRYTGWGRLSRKLINGIRDK |
| | | QSGKTILDFLKSDGFANRNFMQLIHDDSLT |
| | | FKEDIQKAQVSGQGDSLHEHIANLAGSPAI |
| | | KKGILQTVKWDELVKVMGRHKPENIVIEMA |
| | | RENQTTQKGQKNSRERMKRIEEGIKELGSQ |
| | | ILKEHPVENTQLQNEKLYLYYLQNGRDMYV |
| | | DQELDINRLSDYDVDHIVPQSFLKDDSIDN |
| | | KVLTRSDKNRGKSDNVPSEEVVKKMKNYWR |
| | | QLLNAKLITQRKFDNLTKAERGGLSELDKA |
| | | GFIKRQLVETRQITKHVAQILDSRMNTKYD |
| | | ENDKLIREVKVITLKSKLVSDFRKDFQFYK |
| | | VREINNYHHAHDAYLNAVVGTALIKKYPKLE |
| | | SEFVYGDYKVGSSGSETPGTSESATPESSG |
| | | SEVEFSHEYWMRHALTLAKRARDEREVPVG |
| | | AVLVLNNRVIGEGWNRAIGLHDPTAHAEIM |
| | | ALRQGGLVMQNYRLIDATLYVTFEPCVMCA |
| | | GAMIHSRIGRWFGVRNAKTGAAGSLMDVLH |
| | | YPGMNHRVEITEGILADECAALLCYFFRMP |
| | | RQVFNAQKKAQSSTDYDVRKMIAKSEQEIG |
| | | KATAKYFFYSNIMNFFKTEITLANGEIRKR |
| | | PLIETNGETGEIWVDKGRDFATVRKVLSMP |
| | | QVNIVKKTEVQTGGFSKESILPKRNSDKLI |
| | | ARKKDWDPKKYGGFDSPTVAYSVLVVAKVE |
| | | KGKSKKLKSVKELLGITIMERSSFEKNPID |
| | | FLEAKGYKEVKKDLIIKLPKYSLFELENGR |
| | | KRMLASAGELQKGNELALPSKYVNFLYLAS |
| | | HYEKLKGSPEDNEQKQLFVEQHKHYLDEII |
| | | EQISEFSKRVILADANLDKVLSAYNKHRDK |
| | | PIREQAENIIHLFTLTNLGAPAAFKYFDTT |
| | | IDRKRYTSTKEVLDATLIHQSITGLYETRI |
| | | DLSQLGGD |
| 102 Cas9 | 1316 | MDKKYSIGLAIGTNSVGWAVITDEYKVPSK |
| TadAins | | KFKVLGNTDRHSIKKNLIGALLFDSGETAE |
| 1022 | | ATRLKRTARRRYTRRKNRICYLQEIFSNEM |
| polypeptide | | AKVDDSFFHRLEESFLVEEDKKHERHPIFG |
| sequence | | NIVDEVAYHEKYPTIYHLRKKLVDSTDKAD |
| | | LRLIYLALAHMIKFRGHFLIEGDLNPDNSD |
| | | VDKLFIQLVQTYNQLFEENPINASGVDAKA |
| | | ILSARLSKSRRLENLIAQLPGEKKNGLFGN |
| | | LIALSLGLTPNFKSNFDLAEDAKLQLSKDT |
| | | YDDDLDNLLAQIGDQYADLFLAAKNLSDAI |
| | | LLSDILRVNTEITKAPLSASMIKRYDEHHQ |
| | | DLTLLKALVRQQLPEKYKEIFFDQSKNGYA |
| | | GYIDGGASQEEFYKFIKPILEKMDGTEELL |
| | | VKLNREDLLRKQRTFDNGSIPHQIHLGELH |
| | | AILRRQEDFYPFLKDNREKIEKILTFRIPY |
| | | YVGPLARGNSRFAWMTRKSEETITPWNFEE |
| | | VVDKGASAQSFIERMTNFDKNLPNEKVLPK |
| | | HSLLYEYFTVYNELTKVKYVTEGMRKPAFL |
| | | SGEQKKAIVDLLFKTNRKVTVKQLKEDYFK |
| | | KIECFDSVEISGVEDRFNASLGTYHDLLKI |
| | | IKDKDFLDNEENEDILEDIVLTLTLFEDRE |
| | | MIEERLKTYAHLFDDKVMKQLKRRRYTGWG |
| | | RLSRKLINGIRDKQSGKTILDFLKSDGFAN |
| | | RNFMQLIHDDSLTFKEDIQKAQVSGQGDSL |
| | | HEHIANLAGSPAIKKGILQTVKWDELVKVM |
| | | GRHKPENIVIEMARENQTTQKGQKNSRERM |
| | | KRIEEGIKELGSQILKEHPVENTQLQNEKL |
| | | YLYYLQNGRDMYVDQELDINRLSDYDVDHI |
| | | VPQSFLKDDSIDNKVLTRSDKNRGKSDNVP |
| | | SEEVVKKMKNYWRQLLNAKLITQRKFDNLT |
| | | KAERGGLSELDKAGFIKRQLVETRQITKHV |
| | | AQILDSRMNTKYDENDKLIREVKVITLKSK |
| | | LVSDFRKDFQFYKVREINNYHHAHDAYLNA |
| | | WGTALIKKYPKLESEFVYGDYKVYDVRKMI |
| | | GSSGSETPGTSESATPESSGSEVEFSHEYW |
| | | MRHALTLAKRARDEREVPVGAVLVLNNRVI |
| | | GEGWNRAIGLHDPTAHAEIMALRQGGLVMQ |
| | | NYRLIDATLYVTFEPCVMCAGAMIHSRIGR |
| | | VVFGVRNAKTGAAGSLMDVLHYPGMNHRVE |
| | | ITEGILADECAALLCYFFRMPRQVFNAQKK |
| | | AQSSTDAKSEQEIGKATAKYFFYSNIMNFF |
| | | KTEITLANGEIRKRPLIETNGETGEIVWDK |
| | | GRDFATVRKVLSMPQVNIVKKTEVQTGGFS |
| | | KESILPKRNSDKLIARKKDWDPKKYGGFDS |
| | | PTVAYSVLWAKVEKGKSKKLKSVKELLGIT |
| | | IMERSSFEKNPIDFLEAKGYKEVKKDLIIK |
| | | LPKYSLFELENGRKRMLASAGELQKGNELA |
| | | LPSKYVNFLYLASHYEKLKGSPEDNEQKQL |
| | | FVEQHKHYLDEIIEQISEFSKRVILADANL |
| | | DKVLSAYNKHRDKPIREQAENIIHLFTLTN |
| | | LGAPAAFKYFDTTIDRKRYTSTKEVLDATL |
| | | IHQSITGLYETRIDLSQLGGD |
| 103 Cas9 | 1317 | MDKKYSIGLAIGTNSVGWAVITDEYKVPSK |
| TadAins | | KFKVLGNTDRHSIKKNLIGALLFDSGETAE |
| 1029 | | ATRLKRTARRRYTRRKNRICYLQEIFSNEM |
| polypeptide | | AKVDDSFFHRLEESFLVEEDKKHERHPIFG |
| sequence | | NIVDEVAYHEKYPTIYHLRKKLVDSTDKAD |
| | | LRLIYLALAHMIKFRGHFLIEGDLNPDNSD |
| | | VDKLFIQLVQTYNQLFEENPINASGVDAKA |
| | | ILSARLSKSRRLENLIAQLPGEKKNGLFGN |
| | | LIALSLGLTPNFKSNFDLAEDAKLQLSKDT |
| | | YDDDLDNLLAQIGDQYADLFLAAKNLSDAI |
| | | LLSDILRVNTEITKAPLSASMIKRYDEHHQ |
| | | DLTLLKALVRQQLPEKYKEIFFDQSKNGYA |
| | | GYIDGGASQEEFYKFIKPILEKMDGTEELL |
| | | VKLNREDLLRKQRTFDNGSIPHQIHLGELH |
| | | AILRRQEDFYPFLKDNREKIEKILTFRIPY |
| | | YVGPLARGNSRFAWMTRKSEETITPWNFEE |
| | | VVDKGASAQSFIERMTNFDKNLPNEKVLPK |
| | | HSLLYEYFTVYNELTKVKYVTEGMRKPAFL |
| | | SGEQKKAIVDLLFKTNRKVTVKQLKEDYFK |
| | | KIECFDSVEISGVEDRFNASLGTYHDLLKI |
| | | IKDKDFLDNEENEDILEDIVLTLTLFEDRE |
| | | MIEERLKTYAHLFDDKVMKQLKRRRYTGWG |
| | | RLSRKLINGIRDKQSGKTILDFLKSDGFAN |
| | | RNFMQLIHDDSLTFKEDIQKAQVSGQGDSL |
| | | HEHIANLAGSPAIKKGILQTVKVVDELVKV |
| | | MGRHKPENIVIEMARENQTTQKGQKNSRER |
| | | MKRIEEGIKELGSQILKEHPVENTQLQNEK |
| | | LYLYYLQNGRDMYVDQELDINRLSDYDVDH |
| | | IVPQSFLKDDSIDNKVLTRSDKNRGKSDNV |
| | | PSEEVVKKMKNYWRQLLNAKLITQRKFDNL |
| | | TKAERGGLSELDKAGFIKRQLVETRQITKH |
| | | VAQILDSRMNTKYDENDKLIREVKVITLKS |
| | | KLVSDFRKDFQFYKVREINNYHHAHDAYLN |
| | | AWGTALIKKYPKLESEFVYGDYKVYDVRKM |
| | | IAKSEQEIGSSGSETPGTSESATPESSGSE |
| | | VEFSHEYWMRHALTLAKRARDEREVPVGAV |
| | | LVLNNRVIGEGWNRAIGLHDPTAHAEIMAL |
| | | RQGGLVMQNYRLIDATLYVTFEPCVMCAGA |
| | | MIHSRIGRVVFGVRNAKTGAAGSLMDVLHY |
| | | PGMNHRVEITEGILADECAALLCYFFRMPR |
| | | QVFNAQKKAQSSTDGKATAKYFFYSNIMNF |
| | | FKTEITLANGEIRKRPLIETNGETGEIVWD |
| | | KGRDFATVRKVLSMPQVNIVKKTEVQTGGF |
| | | SKESILPKRNSDKLIARKKDWDPKKYGGFD |
| | | SPTVAYSVLVVAKVEKGKSKKLKSVKELLG |
| | | ITIMERSSFEKNPIDFLEAKGYKEVKKDLI |
| | | IKLPKYSLFELENGRKRMLASAGELQKGNE |
| | | LALPSKYVNFLYLASHYEKLKGSPEDNEQK |
| | | QLFVEQHKHYLDEIIEQISEFSKRVILADA |
| | | NLDKVLSAYNKHRDKPIREQAENIIHLFTL |
| | | TNLGAPAAFKYFDTTIDRKRYTSTKEVLDA |
| | | TLIHQSITGLYETRIDLSQLGGD |
| 103 Cas9 | 1318 | MDKKYSIGLAIGTNSVGWAVITDEYKVPSK |
| TadAins | | KFKVLGNTDRHSIKKNLIGALLFDSGETAE |
| 1040 | | ATRLKRTARRRYTRRKNRICYLQEIFSNEM |
| polypeptide | | AKVDDSFFHRLEESFLVEEDKKHERHPIFG |
| sequence | | NIVDEVAYHEKYPTIYHLRKKLVDSTDKAD |
| | | LRLIYLALAHMIKFRGHFLIEGDLNPDNSD |
| | | VDKLFIQLVQTYNQLFEENPINASGVDAKA |
| | | ILSARLSKSRRLENLIAQLPGEKKNGLFGN |
| | | LIALSLGLTPNFKSNFDLAEDAKLQLSKDT |
| | | YDDDLDNLLAQIGDQYADLFLAAKNLSDAI |
| | | LLSDILRVNTEITKAPLSASMIKRYDEHHQ |
| | | DLTLLKALVRQQLPEKYKEIFFDQSKNGYA |
| | | GYIDGGASQEEFYKFIKPILEKMDGTEELL |
| | | VKLNREDLLRKQRTFDNGSIPHQIHLGELH |
| | | AILRRQEDFYPFLKDNREKIEKILTFRIPY |
| | | YVGPLARGNSRFAWMTRKSEETITPWNFEE |
| | | VVDKGASAQSFIERMTNFDKNLPNEKVLPK |
| | | HSLLYEYFTVYNELTKVKYVTEGMRKPAFL |
| | | SGEQKKAIVDLLFKTNRKVTVKQLKEDYFK |
| | | KIECFDSVEISGVEDRFNASLGTYHDLLKI |
| | | IKDKDFLDNEENEDILEDIVLTLTLFEDRE |
| | | MIEERLKTYAHLFDDKVMKQLKRRRYTGWG |
| | | RLSRKLINGIRDKQSGKTILDFLKSDGFAN |
| | | RNFMQLIHDDSLTFKEDIQKAQVSGQGDSL |
| | | HEHIANLAGSPAIKKGILQTVKVVDELVKV |
| | | MGRHKPENIVIEMARENQTTQKGQKNSRER |
| | | MKRIEEGIKELGSQILKEHPVENTQLQNEK |
| | | LYLYYLQNGRDMYVDQELDINRLSDYDVDH |
| | | IVPQSFLKDDSIDNKVLTRSDKNRGKSDNV |
| | | PSEEVVKKMKNYWRQLLNAKLITQRKFDNL |
| | | TKAERGGLSELDKAGFIKRQLVETRQITKH |
| | | VAQILDSRMNTKYDENDKLIREVKVITLKS |
| | | KLVSDFRKDFQFYKVREINNYHHAHDAYLN |
| | | AWGTALIKKYPKLESEFVYGDYKVYDVRKM |
| | | IAKSEQEIGKATAKLDEIIEQISEFSKRVI |
| | | LADANLDKVLSAYNKHRDKPIREQAENIIH |
| | | LFTLTNLGAPAAFKYFDTTIDRKRYTSTKE |
| | | VLDATLIHQSITGLYETRIDLSQLGGD |
| 103 Cas9 | 1317 | MDKKYSIGLAIGTNSVGWAVITDEYKVPSK |
| TadAins | | KFKVLGNTDRHSIKKNLIGALLFDSGETAE |
| 1029 | | ATRLKRTARRRYTRRKNRICYLQEIFSNEM |
| polypeptide | | AKVDDSFFHRLEESFLVEEDKKHERHPIFG |
| sequence | | NIVDEVAYHEKYPTIYHLRKKLVDSTDKAD |
| | | LRLIYLALAHMIKFRGHFLIEGDLNPDNSD |
| | | VDKLFIQLVQTYNQLFEENPINASGVDAKA |
| | | ILSARLSKSRRLENLIAQLPGEKKNGLFGN |
| | | LIALSLGLTPNFKSNFDLAEDAKLQLSKDT |
| | | YDDDLDNLLAQIGDQYADLFLAAKNLSDAI |
| | | LLSDILRVNTEITKAPLSASMIKRYDEHHQ |
| | | DLTLLKALVRQQLPEKYKEIFFDQSKNGYA |
| | | GYIDGGASQEEFYKFIKPILEKMDGTEELL |
| | | VKLNREDLLRKQRTFDNGSIPHQIHLGELH |
| | | AILRRQEDFYPFLKDNREKIEKILTFRIPY |
| | | YVGPLARGNSRFAWMTRKSEETITPWNFEE |
| | | VVDKGASAQSFIERMTNFDKNLPNEKVLPK |
| | | HSLLYEYFTVYNELTKVKYVTEGMRKPAFL |
| | | SGEQKKAIVDLLFKTNRKVTVKQLKEDYFK |
| | | KIECFDSVEISGVEDRFNASLGTYHDLLKI |
| | | IKDKDFLDNEENEDILEDIVLTLTLFEDRE |
| | | MIEERLKTYAHLFDDKVMKQLKRRRYTGWG |
| | | RLSRKLINGIRDKQSGKTILDFLKSDGFAN |
| | | RNFMQLIHDDSLTFKEDIQKAQVSGQGDSL |
| | | HEHIANLAGSPAIKKGILQTVKVVDELVKV |
| | | MGRHKPENIVIEMARENQTTQKGQKNSRER |
| | | MKRIEEGIKELGSQILKEHPVENTQLQNEK |
| | | LYLYYLQNGRDMYVDQELDINRLSDYDVDH |
| | | IVPQSFLKDDSIDNKVLTRSDKNRGKSDNV |
| | | PSEEVVKKMKNYWRQLLNAKLITQRKFDNL |
| | | TKAERGGLSELDKAGFIKRQLVETRQITKH |
| | | VAQILDSRMNTKYDENDKLIREVKVITLKS |
| | | KLVSDFRKDFQFYKVREINNYHHAHDAYLN |
| | | AWGTALIKKYPKLESEFVYGDYKVYDVRKM |
| | | IAKSEQEIGSSGSETPGTSESATPESSGSE |
| | | VEFSHEYWMRHALTLAKRARDEREVPVGAV |
| | | LVLNNRVIGEGWNRAIGLHDPTAHAEIMAL |
| | | RQGGLVMQNYRLIDATLYVTFEPCVMCAGA |
| | | MIHSRIGRVVFGVRNAKTGAAGSLMDVLHY |
| | | PGMNHRVEITEGILADECAALLCYFFRMPR |
| | | QVFNAQKKAQSSTDGKATAKYFFYSNIMNF |
| | | FKTEITLANGEIRKRPLIETNGETGEIVWD |
| | | KGRDFATVRKVLSMPQVNIVKKTEVQTGGF |
| | | SKESILPKRNSDKLIARKKDWDPKKYGGFD |
| | | SPTVAYSVLVVAKVEKGKSKKLKSVKELLG |
| | | ITIMERSSFEKNPIDFLEAKGYKEVKKDLI |
| | | IKLPKYSLFELENGRKRMLASAGELQKGNE |
| | | LALPSKYVNFLYLASHYEKLKGSPEDNEQK |
| | | QLFVEQHKHYLDEIIEQISEFSKRVILADA |
| | | NLDKVLSAYNKHRDKPIREQAENIIHLFTL |
| | | TNLGAPAAFKYFDTTIDRKRYTSTKEVLDA |
| | | TLIHQSITGLYETRIDLSQLGGD |
| 103 Cas9 | 1318 | MDKKYSIGLAIGTNSVGWAVITDEYKVPSK |
| TadAins | | KFKVLGNTDRHSIKKNLIGALLFDSGETAE |
| 1040 | | ATRLKRTARRRYTRRKNRICYLQEIFSNEM |
| polypeptide | | AKVDDSFFHRLEESFLVEEDKKHERHPIFG |
| sequence | | NIVDEVAYHEKYPTIYHLRKKLVDSTDKAD |
| | | LRLIYLALAHMIKFRGHFLIEGDLNPDNSD |
| | | VDKLFIQLVQTYNQLFEENPINASGVDAKA |
| | | ILSARLSKSRRLENLIAQLPGEKKNGLFGN |
| | | LIALSLGLTPNFKSNFDLAEDAKLQLSKDT |
| | | YDDDLDNLLAQIGDQYADLFLAAKNLSDAI |
| | | LLSDILRVNTEITKAPLSASMIKRYDEHHQ |
| | | DLTLLKALVRQQLPEKYKEIFFDQSKNGYA |
| | | GYIDGGASQEEFYKFIKPILEKMDGTEELL |
| | | VKLNREDLLRKQRTFDNGSIPHQIHLGELH |
| | | AILRRQEDFYPFLKDNREKIEKILTFRIPY |
| | | YVGPLARGNSRFAWMTRKSEETITPWNFEE |
| | | VVDKGASAQSFIERMTNFDKNLPNEKVLPK |
| | | HSLLYEYFTVYNELTKVKYVTEGMRKPAFL |
| | | SGEQKKAIVDLLFKTNRKVTVKQLKEDYFK |
| | | KIECFDSVEISGVEDRFNASLGTYHDLLKI |
| | | IKDKDFLDNEENEDILEDIVLTLTLFEDRE |
| | | MIEERLKTYAHLFDDKVMKQLKRRRYTGWG |
| | | RLSRKLINGIRDKQSGKTILDFLKSDGFAN |
| | | RNFMQLIHDDSLTFKEDIQKAQVSGQGDSL |
| | | HEHIANLAGSPAIKKGILQTVKVVDELVKV |
| | | MGRHKPENIVIEMARENQTTQKGQKNSRER |
| | | MKRIEEGIKELGSQILKEHPVENTQLQNEK |
| | | LYLYYLQNGRDMYVDQELDINRLSDYDVDH |
| | | IVPQSFLKDDSIDNKVLTRSDKNRGKSDNV |
| | | PSEEVVKKMKNYWRQLLNAKLITQRKFDNL |
| | | TKAERGGLSELDKAGFIKRQLVETRQITKH |
| | | VAQILDSRMNTKYDENDKLIREVKVITLKS |
| | | KLVSDFRKDFQFYKVREINNYHHAHDAYLN |
| | | AWGTALIKKYPKLESEFVYGDYKVYDVRKM |
| | | IAKSEQEIGKATAKYFFYSGSSGSETPGTS |
| | | ESATPESSGSEVEFSHEYWMRHALTLAKRA |
| | | RDEREVPVGAVLVLNNRVIGEGWNRAIGLH |
| | | DPTAHAEIMALRQGGLVMQNYRLIDATLYV |
| | | TFEPCVMCAGAMIHSRIGRVVFGVRNAKTG |
| | | AAGSLMDVLHYPGMNHRVEITEGILADECA |
| | | ALLCYFFRMPRQVFNAQKKAQSSTDNIMNF |
| | | FKTEITLANGEIRKRPLIETNGETGEIVWD |
| | | KGRDFATVRKVLSMPQVNIVKKTEVQTGGF |
| | | SKESILPKRNSDKLIARKKDWDPKKYGGFD |
| | | SPTVAYSVLWAKVEKGKSKKLKSVKELLGI |
| | | TIMERSSFEKNPIDFLEAKGYKEVKKDLII |
| | | KLPKYSLFELENGRKRMLASAGELQKGNEL |
| | | ALPSKYVNFLYLASHYEKLKGSPEDNEQKQ |
| | | LFVEQHKHYLDEIIEQISEFSKRVILADAN |
| | | LDKVLSAYNKHRDKPIREQAENIIHLFTLT |
| | | NLGAPAAFKYFDTTIDRKRYTSTKEVLDAT |
| | | LIHQSITGLYETRIDLSQLGGD |
| 105 Cas9 | 1319 | MDKKYSIGLAIGTNSVGWAVITDEYKVPSK |
| TadAins | | KFKVLGNTDRHSIKKNLIGALLFDSGETAE |
| 1068 | | ATRLKRTARRRYTRRKNRICYLQEIFSNEM |
| polypeptide | | AKVDDSFFHRLEESFLVEEDKKHERHPIFG |
| sequence | | NIVDEVAYHEKYPTIYHLRKKLVDSTDKAD |
| | | LRLIYLALAHMIKFRGHFLIEGDLNPDNSD |
| | | VDKLFIQLVQTYNQLFEENPINASGVDAKA |
| | | ILSARLSKSRRLENLIAQLPGEKKNGLFGN |
| | | LIALSLGLTPNFKSNFDLAEDAKLQLSKDT |
| | | YDDDLDNLLAQIGDQYADLFLAAKNLSDAI |
| | | LLSDILRVNTEITKAPLSASMIKRYDEHHQ |
| | | DLTLLKALVRQQLPEKYKEIFFDQSKNGYA |
| | | GYIDGGASQEEFYKFIKPILEKMDGTEELL |
| | | VKLNREDLLRKQRTFDNGSIPHQIHLGELH |
| | | AILRRQEDFYPFLKDNREKIEKILTFRIPY |
| | | YVGPLARGNSRFAWMTRKSEETITPWNFEE |
| | | VVDKGASAQSFIERMTNFDKNLPNEKVLPK |
| | | HSLLYEYFTVYNELTKVKYVTEGMRKPAFL |
| | | SGEQKKAIVDLLFKTNRKVTVKQLKEDYFK |
| | | KIECFDSVEISGVEDRFNASLGTYHDLLKI |
| | | IKDKDFLDNEENEDILEDIVLTLTLFEDRE |
| | | MIEERLKTYAHLFDDKVMKQLKRRRYTGWG |
| | | RLSRKLINGIRDKQSGKTILDFLKSDGFAN |
| | | RNFMQLIHDDSLTFKEDIQKAQVSGQGDSL |
| | | HEHIANLAGSPAIKKGILQTVKWDELVKVM |
| | | GRHKPENIVIEMARENQTTQKGQKNSRERM |
| | | KRIEEGIKELGSQILKEHPVENTQLQNEKL |
| | | YLYYLQNGRDMYVDQELDINRLSDYDVDHI |
| | | VPQSFLKDDSIDNKVLTRSDKNRGKSDNVP |
| | | SEEVVKKMKNYWRQLLNAKLITQRKFDNLT |
| | | KAERGGLSELDKAGFIKRQLVETRQITKHV |
| | | AQILDSRMNTKYDENDKLIREVKVITLKSK |
| | | LVSDFRKDFQFYKVREINNYHHAHDAYLNA |
| | | WGTALIKKYPKLESEFVYGDYKVYDVRKMI |
| | | AKSEQEIGKATAKYFFYSNIMNFFKTEITL |
| | | ANGEIRKRPLIETNGEGSSGSETPGTSESA |
| | | TPESSGSEVEFSHEYWMRHALTLAKRARDE |
| | | REVPVGAVLVLNNRVIGEGWNRAIGLHDPT |
| | | AHAEIMALRQGGLVMQNYRLIDATLYVTFE |
| | | PCVMCAGAMIHSRIGRVVFGVRNAKTGAAG |
| | | SLMDVLHYPGMNHRVEITEGILADECAALL |
| | | CYFFRMPRQVFNAQKKAQSSTDTGEIVWDK |
| | | GRDFATVRKVLSMPQVNIVKKTEVQTGGFS |
| | | KESILPKRNSDKLIARKKDWDPKKYGGFDS |
| | | PTVAYSVLWAKVEKGKSKKLKSVKELLGIT |
| | | IMERSSFEKNPIDFLEAKGYKEVKKDLIIK |
| | | LPKYSLFELENGRKRMLASAGELQKGNELA |
| | | LPSKYVNFLYLASHYEKLKGSPEDNEQKQL |
| | | FVEQHKHYLDEIIEQISEFSKRVILADANL |
| | | DKVLSAYNKHRDKPIREQAENIIHLFTLTN |
| | | LGAPAAFKYFDTTIDRKRYTSTKEVLDATL |
| | | IHQSITGLYETRIDLSQLGGD |
| 106 Cas9 | 1320 | MDKKYSIGLAIGTNSVGWAVITDEYKVPSK |
| TadAins | | KFKVLGNTDRHSIKKNLIGALLFDSGETAE |
| 1247 | | ATRLKRTARRRYTRRKNRICYLQEIFSNEM |
| polypeptide | | AKVDDSFFHRLEESFLVEEDKKHERHPIFG |
| sequence | | NIVDEVAYHEKYPTIYHLRKKLVDSTDKAD |
| | | LRLIYLALAHMIKFRGHFLIEGDLNPDNSD |
| | | VDKLFIQLVQTYNQLFEENPINASGVDAKA |
| | | ILSARLSKSRRLENLIAQLPGEKKNGLFGN |
| | | LIALSLGLTPNFKSNFDLAEDAKLQLSKDT |
| | | YDDDLDNLLAQIGDQYADLFLAAKNLSDAI |
| | | LLSDILRVNTEITKAPLSASMIKRYDEHHQ |
| | | DLTLLKALVRQQLPEKYKEIFFDQSKNGYA |
| | | GYIDGGASQEEFYKFIKPILEKMDGTEELL |
| | | VKLNREDLLRKQRTFDNGSIPHQIHLGELH |
| | | AILRRQEDFYPFLKDNREKIEKILTFRIPY |
| | | YVGPLARGNSRFAWMTRKSEETITPWNFEE |
| | | VVDKGASAQSFIERMTNFDKNLPNEKVLPK |
| | | HSLLYEYFTVYNELTKVKYVTEGMRKPAFL |
| | | SGEQKKAIVDLLFKTNRKVTVKQLKEDYFK |
| | | KIECFDSVEISGVEDRFNASLGTYHDLLKI |
| | | IKDKDFLDNEENEDILEDIVLTLTLFEDRE |
| | | MIEERLKTYAHLFDDKVMKQLKRRRYTGWG |
| | | RLSRKLINGIRDKQSGKTILDFLKSDGFAN |
| | | RNFMQLIHDDSLTFKEDIQKAQVSGQGDSL |
| | | HEHIANLAGSPAIKKGILQTVKVVDELVKV |
| | | MGRHKPENIVIEMARENQTTQKGQKNSRER |
| | | MKRIEEGIKELGSQILKEHPVENTQLQNEK |
| | | LYLYYLQNGRDMYVDQELDINRLSDYDVDH |
| | | IVPQSFLKDDSIDNKVLTRSDKNRGKSDNV |
| | | PSEEVVKKMKNYWRQLLNAKLITQRKFDNL |
| | | TKAERGGLSELDKAGFIKRQLVETRQITKH |
| | | VAQILDSRMNTKYDENDKLIREVKVITLKS |
| | | KLVSDFRKDFQFYKVREINNYHHAHDAYLN |
| | | AWGTALIKKYPKLESEFVYGDYKVYDVRKM |
| | | iAKSEQEIGKATAKYFFYSNIMNFFKTEITL |
| | | ANGEIRKRPLIETNGETGEIVWDKGRDFAT |
| | | VRKVLSMPQVNIVKKTEVQTGGFSKESILP |
| | | KRNSDKLIARKKDWDPKKYGGFDSPTVAYS |
| | | VLVVAKVEKGKSKKLKSVKELLGITIMERS |
| | | SFEKNPIDFLEAKGYKEVKKDLIIKLPKYS |
| | | LFELENGRKRMLASAGELQKGNELALPSKY |
| | | VNFLYLASHYEKLKGGSSGSETPGTSESAT |
| | | PESSGSEVEFSHEYWMRHALTLAKRARDER |
| | | EVPVGAVLVLNNRVIGEGWNRAIGLHDPTA |
| | | HAEIMALRQGGLVMQNYRLIDATLYVTFEP |
| | | CVMC |
| | | AGAMIHSRIGRWFGVRNAKTGAAGSLMDVL |
| | | HYPGMNHRVEITEGILADECAALLCYFFRM |
| | | PRQVFNAQKKAQSSTDSPEDNEQKQLFVEQ |
| | | HKHYLDEIIEQISEFSKRVILADANLDKVL |
| | | SAYNKHRDKPIREQAENIIHLFTLTNLGAP |
| | | AAFKYFDTTIDRKRYTSTKEVLDATLIHQS |
| | | ITGLYETRIDLSQLGGD |
| 107 Cas9 | 1321 | MDKKYSIGLAIGTNSVGWAVITDEYKVPSK |
| TadAins | | KFKVLGNTDRHSIKKNLIGALLFDSGETAE |
| 1054 | | ATRLKRTARRRYTRRKNRICYLQEIFSNEM |
| polypeptide | | AKVDDSFFHRLEESFLVEEDKKHERHPIFG |
| sequence | | NIVDEVAYHEKYPTIYHLRKKLVDSTDKAD |
| | | LRLIYLALAHMIKFRGHFLIEGDLNPDNSD |
| | | VDKLFIQLVQTYNQLFEENPINASGVDAKA |
| | | ILSARLSKSRRLENLIAQLPGEKKNGLFGN |
| | | LIALSLGLTPNFKSNFDLAEDAKLQLSKDT |
| | | YDDDLDNLLAQIGDQYADLFLAAKNLSDAI |
| | | LLSDILRVNTEITKAPLSASMIKRYDEHHQ |
| | | DLTLLKALVRQQLPEKYKEIFFDQSKNGYA |
| | | GYIDGGASQEEFYKFIKPILEKMDGTEELL |
| | | VKLNREDLLRKQRTFDNGSIPHQIHLGELH |
| | | AILRRQEDFYPFLKDNREKIEKILTFRIPY |
| | | YVGPLARGNSRFAWMTRKSEETITPWNFEE |
| | | VVDKGASAQSFIERMTNFDKNLPNEKVLPK |
| | | HSLLYEYFTVYNELTKVKYVTEGMRKPAFL |
| | | SGEQKKAIVDLLFKTNRKVTVKQLKEDYFK |
| | | KIECFDSVEISGVEDRFNASLGTYHDLLKI |
| | | IKDKDFLDNEENEDILEDIVLTLTLFEDRE |
| | | MIEERLKTYAHLFDDKVMKQLKRRRYTGWG |
| | | RLSRKLINGIRDKQSGKTILDFLKSDGFAN |
| | | RNFMQLIHDDSLTFKEDIQKAQVSGQGDSL |
| | | HEHIANLAGSPAIKKGILQTVKWDELVKVM |
| | | GRHKPENIVIEMARENQTTQKGQKNSRERM |
| | | KRIEEGIKELGSQILKEHPVENTQLQNEKL |
| | | YLYYLQNGRDMYVDQELDINRLSDYDVDHI |
| | | VPQSFLKDDSIDNKVLTRSDKNRGKSDNVP |
| | | SEEVVKKMKNYWRQLLNAKLITQRKFDNLT |
| | | KAERGGLSELDKAGFIKRQLVETRQITKHV |
| | | AQILDSRMNTKYDENDKLIREVKVITLKSK |
| | | LVSDFRKDFQFYKVREINNYHHAHDAYLNA |
| | | WGTALIKKYPKLESEFVYGDYKVYDVRKMI |
| | | AKSEQEIGKATAKYFFYSNIMNFFKTEITL |
| | | ANGSSGSETPGTSESATPESSGSEVEFSHE |
| | | YWMRHALTLAKRARDEREVPVGAVLVLNNR |
| | | VIGEGWNRAIGLHDPTAHAEIMALRQGGLV |
| | | MQNYRLIDATLYVTFEPCVMCAGAMIHSRI |
| | | GRVVFGVRNAKTGAAGSLMDVLHYPGMNHR |
| | | VEITEGILADECAALLCYFFRMPRQVFNAQ |
| | | KKAQSSTDGEIRKRPLIETNGETGEIVWDK |
| | | GRDFATVRKVLSMPQVNIVKKTEVQTGGFS |
| | | KESILPKRNSDKLIARKKDWDPKKYGGFDS |
| | | PTVAYSVLVVAKVEKGKSKKLKSVKELLGI |
| | | TIMERSSFEKNPIDFLEAKGYKEVKKDLII |
| | | KLPKYSLFELENGRKRMLASAGELQKGNEL |
| | | ALPSKYVNFLYLASHYEKLKGSPEDNEQKQ |
| | | LFVEQHKHYLDEIIEQISEFSKRVILADAN |
| | | LDKVLSAYNKHRDKPIREQAENIIHLFTLT |
| | | NLGAPAAFKYFDTTIDRKRYTSTKEVLDAT |
| | | LIHQSITGLYETRIDLSQLGGD |
| 108 Cas9 | 1322 | MDKKYSIGLAIGTNSVGWAVITDEYKVPSK |
| TadAins | | KFKVLGNTDRHSIKKNLIGALLFDSGETAE |
| 1026 | | ATRLKRTARRRYTRRKNRICYLQEIFSNEM |
| polypeptide | | AKVDDSFFHRLEESFLVEEDKKHERHPIFG |
| sequence | | NIVDEVAYHEKYPTIYHLRKKLVDSTDKAD |
| | | LRLIYLALAHMIKFRGHFLIEGDLNPDNSD |
| | | VDKLFIQLVQTYNQLFEENPINASGVDAKA |
| | | ILSARLSKSRRLENLIAQLPGEKKNGLFGN |
| | | LIALSLGLTPNFKSNFDLAEDAKLQLSKDT |
| | | YDDDLDNLLAQIGDQYADLFLAAKNLSDAI |
| | | LLSDILRVNTEITKAPLSASMIKRYDEHHQ |
| | | DLTLLKALVRQQLPEKYKEIFFDQSKNGYA |
| | | GYIDGGASQEEFYKFIKPILEKMDGTEELL |
| | | VKLNREDLLRKQRTFDNGSIPHQIHLGELH |
| | | AILRRQEDFYPFLKDNREKIEKILTFRIPY |
| | | YVGPLARGNSRFAWMTRKSEETITPWNFEE |
| | | VVDKGASAQSFIERMTNFDKNLPNEKVLPK |
| | | HSLLYEYFTVYNELTKVKYVTEGMRKPAFL |
| | | SGEQKKAIVDLLFKTNRKVTVKQLKEDYFK |
| | | KIECFDSVEISGVEDRFNASLGTYHDLLKI |
| | | IKDKDFLDNEENEDILEDIVLTLTLFEDRE |
| | | MIEERLKTYAHLFDDKVMKQLKRRRYTGWG |
| | | RLSRKLINGIRDKQSGKTILDFLKSDGFAN |
| | | RNFMQLIHDDSLTFKEDIQKAQVSGQGDSL |
| | | HEHIANLAGSPAIKKGILQTVKVVDELVKV |
| | | MGRHKPENIVIEMARENQTTQKGQKNSRER |
| | | MKRIEEGIKELGSQILKEHPVENTQLQNEK |
| | | LYLYYLQNGRDMYVDQELDINRLSDYDVDH |
| | | IVPQSFLKDDSIDNKVLTRSDKNRGKSDNV |
| | | PSEEVVKKMKNYWRQLLNAKLITQRKFDNL |
| | | TKAERGGLSELDKAGFIKRQLVETRQITKH |
| | | VAQILDSRMNTKYDENDKLIREVKVITLKS |
| | | KLVSDFRKDFQFYKVREINNYHHAHDAYLN |
| | | AWGTALIKKYPKLESEFVYGDYKVYDVRKM |
| | | iAKSEGSSGSETPGTSESATPESSGSEVEFS |
| | | HEYWMRHALTLAKRARDEREVPVGAVLVLN |
| | | NRVIGEGWNRAIGLHDPTAHAEIMALRQGG |
| | | LVMQNYRLIDATLYVTFEPCVMCAGAMIHS |
| | | RIGRVVFGVRNAKTGAAGSLMDVLHYPGMN |
| | | HRVEITEGILADECAALLCYFFRMPRQVFN |
| | | AQKKAQSSTDQEIGKATAKYFFYSNIMNFF |
| | | KTEITLANGEIRKRPLIETNGETGEIVWDK |
| | | GRDFATVRKVLSMPQVNIVKKTEVQTGGFS |
| | | KESILPKRNSDKLIARKKDWDPKKYGGFDS |
| | | PTVAYSVLWAKVEKGKSKKLKSVKELLGIT |
| | | IMERSSFEKNPIDFLEAKGYKEVKKDLIIK |
| | | LPKYSLFELENGRKRMLASAGELQKGNELA |
| | | LPSKYVNFLYLASHYEKLKGSPEDNEQKQL |
| | | FVEQHKHYLDEIIEQISEFSKRVILADANL |
| | | DKVLSAYNKHRDKPIREQAENIIHLFTLTN |
| | | LGAPAAFKYFDTTIDRKRYTSTKEVLDATL |
| | | IHQSITGLYETRIDLSQLGGD |
| 109 Cas9 | 1323 | MDKKYSIGLAIGTNSVGWAVITDEYKVPSK |
| TadAins | | KFKVLGNTDRHSIKKNLIGALLFDSGETAE |
| 768 | | ATRLKRTARRRYTRRKNRICYLQEIFSNEM |
| polypeptide | | AKVDDSFFHRLEESFLVEEDKKHERHPIFG |
| sequence | | NIVDEVAYHEKYPTIYHLRKKLVDSTDKAD |
| | | LRLIYLALAHMIKFRGHFLIEGDLNPDNSD |
| | | VDKLFIQLVQTYNQLFEENPINASGVDAKA |
| | | ILSARLSKSRRLENLIAQLPGEKKNGLFGN |
| | | LIALSLGLTPNFKSNFDLAEDAKLQLSKDT |
| | | YDDDLDNLLAQIGDQYADLFLAAKNLSDAI |
| | | LLSDILRVNTEITKAPLSASMIKRYDEHHQ |
| | | DLTLLKALVRQQLPEKYKEIFFDQSKNGYA |
| | | GYIDGGASQEEFYKFIKPILEKMDGTEELL |
| | | VKLNREDLLRKQRTFDNGSIPHQIHLGELH |
| | | AILRRQEDFYPFLKDNREKIEKILTFRIPY |
| | | YVGPLARGNSRFAWMTRKSEETITPWNFEE |
| | | VVDKGASAQSFIERMTNFDKNLPNEKVLPK |
| | | HSLLYEYFTVYNELTKVKYVTEGMRKPAFL |
| | | SGEQKKAIVDLLFKTNRKVTVKQLKEDYFK |
| | | KIECFDSVEISGVEDRFNASLGTYHDLLKI |
| | | IKDKDFLDNEENEDILEDIVLTLTLFEDRE |
| | | MIEERLKTYAHLFDDKVMKQLKRRRYTGWG |
| | | RLSRKLINGIRDKQSGKTILDFLKSDGFAN |
| | | RNFMQLIHDDSLTFKEDIQKAQVSGQGDSL |
| | | HEHIANLAGSPAIKKGILQTVKVVDELVKV |
| | | MGRHKPENIVIEMARENQGSSGSETPGTSE |
| | | SATPESSGSEVEFSHEYWMRHALTLAKRAR |
| | | DEREVPVGAVLVLNNRVIGEGWNRAIGLHD |
| | | PTAHAEIMALRQGGLVMQNYRLIDATLYVT |
| | | FEPCVMCAGAMIHSRIGRWFGVRNAKTGAA |
| | | GSLMDVLHYPGMNHRVEITEGILADECAAL |
| | | LCYFFRMPRTTQKGQKNSRERMKRIEEGIK |
| | | ELGSQILKEHPVENTQLQNEKLYLYYLQNG |
| | | RDMYVDQELDINRLSDYDVDHIVPQSFLK |
| | | DDSIDNKVLTRSDKNRGKSDNVP |
| | | SEEWKKMKNYWRQLLNAKLITQRKFDNLTK |
| | | AERGGLSELDKAGFIKRQLVETRQITKHVA |
| | | QILDSRMNTKYDENDKLIREVKVITLKSKL |
| | | VSDFRKDFQFYKVREINNYHHAHDAYLNAVV |
| | | GTALIKKYPKLESEFVYGDYKVYDVRKMIA |
| | | KSEQEIGKATAKYFFYSNIMNFFKTEITLA |
| | | NGEIRKRPLIETNGETGEIVWDKGRDFATV |
| | | RKVLSMPQVNIVKKTEVQTGGFSKESILPK |
| | | RNSDKLIARKKDWDPKKYGGFDSPTVAYSV |
| | | LVVAKVEKGKSKKLKSVKELLGITIMERSS |
| | | FEKNPIDFLEAK |
| | | GYKEVKKDLIIKLPKYSLFELENGRKRMLA |
| | | SAGELQKGNELALPSKYVNFLYLASHYEKL |
| | | KGSPEDNEQKQLFVEQHKHYLDEIIEQISE |
| | | FSKRVILADANLDKVLSAYNKHRDKPIREQ |
| | | AENIIHLFTLTNLGAPAAFKYFDTTIDRKR |
| | | YTSTKEVLDATLIHQSITGLYETRIDLSQL |
| | | GGD |
| 110.1 Cas9 | 1324 | MDKKYSIGLAIGTNSVGWAVITDEYKVPSK |
| TadAins 1250 | | KFKVLGNTDRHSIKKNLIGALLFDSGETAE |
| polypeptide | | ATRLKRTARRRYTRRKNRICYLQEIFSNEM |
| sequence | | AKVDDSFFHRLEESFLVEEDKKHERHPIFG |
| | | NIVDEVAYHEKYPTIYHLRKKLVDSTDKAD |
| | | LRLIYLALAHMIKFRGHFLIEGDLNPDNSD |
| | | VDKLFIQLVQTYNQLFEENPINASGVDAKA |
| | | ILSARLSKSRRLENLIAQLPGEKKNGLFGN |
| | | LIALSLGLTPNFKSNFDLAEDAKLQLSKDT |
| | | YDDDLDNLLAQIGDQYADLFLAAKNLSDAI |
| | | LLSDILRVNTEITKAPLSASMIKRYDEHHQ |
| | | DLTLLKALVRQQLPEKYKEIFFDQSKNGYA |
| | | GYIDGGASQEEFYKFIKPILEKMDGTEELL |
| | | VKLNREDLLRKQRTFDNGSIPHQIHLGELH |
| | | AILRRQEDFYPFLKDNREKIEKILTFRIPY |
| | | YVGPLARGNSRFAWMTRKSEETITPWNFEE |
| | | VVDKGASAQSFIERMTNFDKNLPNEKVLPK |
| | | HSLLYEYFTVYNELTKVKYVTEGMRKPAFL |
| | | SGEQKKAIVDLLFKTNRKVTVKQLKEDYFK |
| | | KIECFDSVEISGVEDRFNASLGTYHDLLKI |
| | | IKDKDFLDNEENEDILEDIVLTLTLFEDRE |
| | | MIEERLKTYAHLFDDKVMKQLKRRRYTGWG |
| | | RLSRKLINGIRDKQSGKTILDFLKSDGFAN |
| | | RNFMQLIHDDSLTFKEDIQKAQVSGQGDSL |
| | | HEHIANLAGSPAIKKGILQTVKVVDELVKV |
| | | MGRHKPENIVIEMARENQTTQKGQKNSRER |
| | | MKRIEEGIKELGSQILKEHPVENTQLQNEK |
| | | LYLYYLQNGRDMYVDQELDINRLSDYDVDH |
| | | IVPQSFLKDDSIDNKVLTRSDKNRGKSDNV |
| | | PSEEVVKKMKNYWRQLLNAKLITQRKFDNL |
| | | TKAERGGLSELDKAGFIKRQLVETRQITKH |
| | | VAQILDSRMNTKYDENDKLIREVKVITLKS |
| | | KLVSDFRKDFQFYKVREINNYHHAHDAYLN |
| | | AVVGTALIKKYPKLESEFVYGDYKVYDVRK |
| | | MIAKSEQEIGKATAKYFFYSNIMNFFKTEI |
| | | TLANGEIRKRPLIETNGETGEIVWDKGRDF |
| | | ATVRKVLSMPQVNIVKKTEVQTGGFSKESI |
| | | LPKRNSDKLIARKKDWDPKKYGGFDSPTVA |
| | | YSVLVVAKVEKGKSKKLKSVKELLGITIME |
| | | RSSFEKNPIDFLEAKGYKEVKKDLIIKLPK |
| | | YSLFELENGRKRMLAISAGELQKGNELALP |
| | | SKYVNFLYLASHYEKLKGSPGSSGSETPGT |
| | | SESATPESSGSEVEFSHEYWMRHALTLAKR |
| | | ARDEREVPVGAVLVLNNRVIGEGWNRAIGL |
| | | HDPTAHAEIMALRQGGLVMQNYRLIDATLY |
| | | VTFEPCVMCAGAMIHSRIGRVVFGVRNAKT |
| | | GAAGSLMDVLHYPGMNHRVEITEGILADEC |
| | | AALLCYFFRMPREDNEQKQLFVEQHKHYLD |
| | | EIIEQISEFSKRVILADANLDKVLSAYNKH |
| | | RDKPIREQAENIIHLFTLTNLGAPAAFKYF |
| | | DTTIDRKRYTSTKEVLDATLIHQSITGLYE |
| | | TRIDLSQLGGD |
| 110.2 Cas9 | 1325 | MDKKYSIGLAIGTNSVGWAVITDEYKVPSK |
| TadAins 1250 | | KFKVLGNTDRHSIKKNLIGALLFDSGETAE |
| polypeptide | | ATRLKRTARRRYTRRKNRICYLQEIFSNEM |
| sequence | | AKVDDSFFHRLEESFLVEEDKKHERHPIFG |
| | | NIVDEVAYHEKYPTIYHLRKKLVDSTDKAD |
| | | LRLIYLALAHMIKFRGHFLIEGDLNPDNSD |
| | | VDKLFIQLVQTYNQLFEENPINASGVDAKA |
| | | ILSARLSKSRRLENLIAQLPGEKKNGLFGN |
| | | LIALSLGLTPNFKSNFDLAEDAKLQLSKDT |
| | | YDDDLDNLLAQIGDQYADLFLAAKNLSDAI |
| | | LLSDILRVNTEITKAPLSASMIKRYDEHHQ |
| | | DLTLLKALVRQQLPEKYKEIFFDQSKNGYA |
| | | GYIDGGASQEEFYKFIKPILEKMDGTEELL |
| | | VKLNREDLLRKQRTFDNGSIPHQIHLGELH |
| | | AILRRQEDFYPFLKDNREKIEKILTFRIPY |
| | | YVGPLARGNSRFAWMTRKSEETITPWNFEE |
| | | VVDKGASAQSFIERMTNFDKNLPNEKVLPK |
| | | HSLLYEYFTVYNELTKVKYVTEGMRKPAFL |
| | | SGEQKKAIVDLLFKTNRKVTVKQLKEDYFK |
| | | KIECFDSVEISGVEDRFNASLGTYHDLLKI |
| | | IKDKDFLDNEENEDILEDIVLTLTLFEDRE |
| | | MIEERLKTYAHLFDDKVMKQLKRRRYTGWG |
| | | RLSRKLINGIRDKQSGKTILDFLKSDGFAN |
| | | RNFMQLIHDDSLTFKEDIQKAQVSGQGDSL |
| | | HEHIANLAGSPAIKKGILQTVKVVDELVKV |
| | | MGRHKPENIVIEMARENQTTQKGQKNSRER |
| | | MKRIEEGIKELGSQILKEHPVENTQLQNEK |
| | | LYLYYLQNGRDMYVDQELDINRLSDYDVDH |
| | | IVPQSFLKDDSIDNKVLTRSDKNRGKSDNV |
| | | PSEEVVKKMKNYWRQLLNAKLITQRKFDNL |
| | | TKAERGGLSELDKAGFIKRQLVETRQITKH |
| | | VAQILDSRMNTKYDENDKLIREVKVITLKS |
| | | KLVSDFRKDFQFYKVREINNYHHAHDAYLN |
| | | AVVGTALIKKYPKLESEFVYGDYKVYDVRK |
| | | MIAKSEQEIGKATAKYFFYSNIMNFFKTEI |
| | | TLANGEIRKRPLIETNGETGEIVWDKGRDF |
| | | ATVRKVLSMPQVNIVKKTEVQTGGFSKESI |
| | | LPKRNSDKLIARKKDWDPKKYGGFDSPTVA |
| | | YSVLVVAKVEKGKSKKLKSVKELLGITIME |
| | | RSSFEKNPIDFLEAKGYKEVKKDLIIKLPK |
| | | YSLFELENGRKRMLASAGELQKGNELALPS |
| | | KYVNFLYLASHYEKLKGSPGSSGSSGSETP |
| | | GTSESATPESSGSEVEFSHEYWMRHALTLA |
| | | KRARDEREVPVGAVLVLNNRVIGEGWNRAI |
| | | GLHDPTAHAEIMALRQGGLVMQNYRLIDAT |
| | | LYVTFEPCVMCAGAMIHSRIGRVVFGVRNA |
| | | KTGAAGSLMDVLHYPGMNHRVEITEGILAD |
| | | ECAALLCYFFRMPREDNEQKQLFVEQHKHY |
| | | LDEIIEQISEFSKRVILADANLDKVLSAYN |
| | | KHRDKPIREQAENIIHLFTLTNLGAPAAFK |
| | | YFDTTIDRKRYTSTKEVLDATLIHQSITGL |
| | | YETRIDLSQLGGD |
| 110.3 Cas9 | 1326 | MDKKYSIGLAIGTNSVGWAVITDEYKVPSK |
| TadAins 1250 | | KFKVLGNTDRHSIKKNLIGALLFDSGETAE |
| polypeptide | | ATRLKRTARRRYTRRKNRICYLQEIFSNEM |
| sequence | | AKVDDSFFHRLEESFLVEEDKKHERHPIFG |
| | | NIVDEVAYHEKYPTIYHLRKKLVDSTDKAD |
| | | LRLIYLALAHMIKFRGHFLIEGDLNPDNSD |
| | | VDKLFIQLVQTYNQLFEENPINASGVDAKA |
| | | ILSARLSKSRRLENLIAQLPGEKKNGLFGN |
| | | LIALSLGLTPNFKSNFDLAEDAKLQLSKDT |
| | | YDDDLDNLLAQIGDQYADLFLAAKNLSDAI |
| | | LLSDILRVNTEITKAPLSASMIKRYDEHHQ |
| | | DLTLLKALVRQQLPEKYKEIFFDQSKNGYA |
| | | GYIDGGASQEEFYKFIKPILEKMDGTEELL |
| | | VKLNREDLLRKQRTFDNGSIPHQIHLGELH |
| | | AILRRQEDFYPFLKDNREKIEKILTFRIPY |
| | | YVGPLARGNSRFAWMTRKSEETITPWNFEE |
| | | VVDKGASAQSFIERMTNFDKNLPNEKVLPK |
| | | HSLLYEYFTVYNELTKVKYVTEGMRKPAFL |
| | | SGEQKKAIVDLLFKTNRKVTVKQLKEDYFK |
| | | KIECFDSVEISGVEDRFNASLGTYHDLLKI |
| | | IKDKDFLDNEENEDILEDIVLTLTLFEDRE |
| | | MIEERLKTYAHLFDDKVMKQLKRRRYTGWG |
| | | RLSRKLINGIRDKQSGKTILDFLKSDGFAN |
| | | RNFMQLIHDDSLTFKEDIQKAQVSGQGDSL |
| | | HEHIANLAGSPAIKKGILQTVKWDELVKVM |
| | | GRHKPENIVIEMARENQTTQKGQKNSRERM |
| | | KRIEEGIKELGSQILKEHPVENTQLQNEKL |
| | | YLYYLQNGRDMYVDQELDINRLSDYDVDHI |
| | | VPQSFLKDDSIDNKVLTRSDKNRGKSDNVP |
| | | SEEVVKKMKNYWRQLLNAKLITQRKFDNLT |
| | | KAERGGLSELDKAGFIKRQLVETRQITKHV |
| | | AQILDSRMNTKYDENDKLIREVKVITLKSK |
| | | LVSDFRKDFQFYKVREINNYHHAHDAYLNA |
| | | VVGTALIKKYPKLESEFVYGDYKVYDVRKM |
| | | IAKSEQEIGKATAKYFFYSNIMNFFKTEIT |
| | | LANGEIRKRPLIETNGETGEIVWDKGRDFA |
| | | TVRKVLSMPQVNIVKKTEVQTGGFSKESIL |
| | | PKRNSDKLIARKKDWDPKKYGGFDSPTVAY |
| | | SVLVVAKVEKGKSKKLKSVKELLGITIMER |
| | | SSFEKNPIDFLEAKGYKEVKKDLIIKLPKY |
| | | SLFELENGRKRMLASAGELQKGNELALPSK |
| | | YVNFLYLASHYEKLKGSPGSSGSSGSETPG |
| | | TSESATPESGSSSGSEVEFSHEYWMRHALT |
| | | LAKRARDEREVPVGAVLVLNNRVIGEGWNR |
| | | AIGLHDPTAHAEIMALRQGGLVMQNYRLID |
| | | ATLYVTFEPCVMCAGAMIHSRIGRVVFGVR |
| | | NAKTGAAGSLMDVLHYPGMNHRVEITEGIL |
| | | ADECAALLCYFFRMPREDNEQKQLFVEQHK |
| | | HYLDEIIEQISEFSKRVILADANLDKVLSA |
| | | YNKHRDKPIREQAENIIHLFTLTNLGAPAA |
| | | FKYFDTTIDRKRYTSTKEVLDATLIHQSIT |
| | | GLYETRIDLSQLGGD |
| 110.4 Cas9 | 1327 | MDKKYSIGLAIGTNSVGWAVITDEYKVPSK |
| TadAins 1250 | | KFKVLGNTDRHSIKKNLIGALLFDSGETAE |
| polypeptide | | ATRLKRTARRRYTRRKNRICYLQEIFSNEM |
| sequence | | AKVDDSFFHRLEESFLVEEDKKHERHPIFG |
| | | NIVDEVAYHEKYPTIYHLRKKLVDSTDKAD |
| | | LRLIYLALAHMIKFRGHFLIEGDLNPDNSD |
| | | VDKLFIQLVQTYNQLFEENPINASGVDAKA |
| | | ILSARLSKSRRLENLIAQLPGEKKNGLFGN |
| | | LIALSLGLTPNFKSNFDLAEDAKLQLSKDT |
| | | YDDDLDNLLAQIGDQYADLFLAAKNLSDAI |
| | | LLSDILRVNTEITKAPLSASMIKRYDEHHQ |
| | | DLTLLKALVRQQLPEKYKEIFFDQSKNGYA |
| | | GYIDGGASQEEFYKFIKPILEKMDGTEELL |
| | | VKLNREDLLRKQRTFDNGSIPHQIHLGELH |
| | | AILRRQEDFYPFLKDNREKIEKILTFRIPY |
| | | YVGPLARGNSRFAWMTRKSEETITPWNFEE |
| | | VVDKGASAQSFIERMTNFDKNLPNEKVLPK |
| | | HSLLYEYFTVYNELTKVKYVTEGMRKPAFL |
| | | SGEQKKAIVDLLFKTNRKVTVKQLKEDYFK |
| | | KIECFDSVEISGVEDRFNASLGTYHDLLKI |
| | | IKDKDFLDNEENEDILEDIVLTLTLFEDRE |
| | | MIEERLKTYAHLFDDKVMKQLKRRRYTGWG |
| | | RLSRKLINGIRDKQSGKTILDFLKSDGFAN |
| | | RNFMQLIHDDSLTFKEDIQKAQVSGQGDSL |
| | | HEHIANLAGSPAIKKGILQTVKVVDELVKV |
| | | MGRHKPENIVIEMARENQTTQKGQKNSRER |
| | | MKRIEEGIKELGSQILKEHPVENTQLQNEK |
| | | LYLYYLQNGRDMYVDQELDINRLSDYDVDH |
| | | IVPQSFLKDDSIDNKVLTRSDKNRGKSDNV |
| | | PSEEVVKKMKNYWRQLLNAKLITQRKFDNL |
| | | TKAERGGLSELDKAGFIKRQLVETRQITKH |
| | | VAQILDSRMNTKYDENDKLIREVKVITLKS |
| | | KLVSDFRKDFQFYKVREINNYHHAHDAYLN |
| | | AVVGTALIKKYPKLESEFVYGDYKVYDVRK |
| | | MIAKSEQEIGKATAKYFFYSNIMNFFKTEI |
| | | TLANGEIRKRPLIETNGETGEIVWDKGRDF |
| | | ATVRKVLSMPQVNIVKKTEVQTGGFSKESI |
| | | LPKRNSDKLIARKKDWDPKKYGGFDSPTVA |
| | | YSVLVVAKVEKGKSKKLKSVKELLGITIME |
| | | RSSFEKNPIDFLEAKGYKEVKKDLIIKLPK |
| | | YSLFELENGRKRMU\SAGELQKGNELALPS |
| | | KYVNFLYLASHYEKLKGSPGSSGSSGSETP |
| | | GTSESATPESGSSSGSEVEFSHEYWMRHAL |
| | | TLAKRARDEREVPVGAVLVLNNRVIGEGWN |
| | | RAIGLHDPTAHAEIMALRQGGLVMQNYRLI |
| | | DATLYVTFEPCVMCAGAMIHSRIGRVVFGV |
| | | RNAKTGAAGSLMDVLHYPGMNHRVEITEGI |
| | | LADECAALLCYFFRMRREDNEQKQLFVEQH |
| | | KHYLDEIIEQISEFSKRVILADANLDKVLS |
| | | AYNKHRDKPIREQAENIIHLFTLTNLGAPA |
| | | AFKYFDTTIDRKRYTSTKEVLDATLIHQSI |
| | | TGLYETRIDLSQLGGD |
| 110.5 Cas9 | 1328 | MDKKYSIGLAIGTNSVGWAVITDEYKVPSK |
| TadAins 1249 | | KFKVLGNTDRHSIKKNLIGALLFDSGETAE |
| polypeptide | | ATRLKRTARRRYTRRKNRICYLQEIFSNEM |
| sequence | | AKVDDSFFHRLEESFLVEEDKKHERHPIFG |
| | | NIVDEVAYHEKYPTIYHLRKKLVDSTDKAD |
| | | LRLIYLALAHMIKFRGHFLIEGDLNPDNSD |
| | | VDKLFIQLVQTYNQLFEENPINASGVDAKA |
| | | ILSARLSKSRRLENLIAQLPGEKKNGLFGN |
| | | LIALSLGLTPNFKSNFDLAEDAKLQLSKDT |
| | | YDDDLDNLLAQIGDQYADLFLAAKNLSDAI |
| | | LLSDILRVNTEITKAPLSASMIKRYDEHHQ |
| | | DLTLLKALVRQQLPEKYKEIFFDQSKNGYA |
| | | GYIDGGASQEEFYKFIKPILEKMDGTEELL |
| | | VKLNREDLLRKQRTFDNGSIPHQIHLGELH |
| | | AILRRQEDFYPFLKDNREKIEKILTFRIPY |
| | | YVGPLARGNSRFAWMTRKSEETITPWNFEE |
| | | VVDKGASAQSFIERMTNFDKNLPNEKVLPK |
| | | HSLLYEYFTVYNELTKVKYVTEGMRKPAFL |
| | | SGEQKKAIVDLLFKTNRKVTVKQLKEDYFK |
| | | KIECFDSVEISGVEDRFNASLGTYHDLLKI |
| | | IKDKDFLDNEENEDILEDIVLTLTLFEDRE |
| | | MIEERLKTYAHLFDDKVMKQLKRRRYTGWG |
| | | RLSRKLINGIRDKQSGKTILDFLKSDGFAN |
| | | RNFMQLIHDDSLTFKEDIQKAQVSGQGDSL |
| | | HEHIANLAGSPAIKKGILQTVKWDELVKVM |
| | | GRHKPENIVIEMARENQTTQKGQKNSRERM |
| | | KRIEEGIKELGSQILKEHPVENTQLQNEKL |
| | | YLYYLQNGRDMYVDQELDINRLSDYDVDHI |
| | | VPQSFLKDDSIDNKVLTRSDKNRGKSDNVP |
| | | SEEVVKKMKNYWRQLLNAKLITQRKFDNLT |
| | | KAERGGLSELDKAGFIKRQLVETRQITKHV |
| | | AQILDSRMNTKYDENDKLIREVKVITLKSK |
| | | LVSDFRKDFQFYKVREINNYHHAHDAYLNA |
| | | VVGTALIKKYPKLESEFVYGDYKVYDVRKM |
| | | IAKSEQEIGKATAKYFFYSNIMNFFKTEIT |
| | | LANGEIRKRPLIETNGETGEIVWDKGRDFA |
| | | TVRKVLSMPQVNIVKKTEVQTGGFSKESIL |
| | | PKRNSDKLIARKKDWDPKKYGGFDSPTVAY |
| | | SVLVVAKVEKGKSKKLKSVKELLGITIMER |
| | | SSFEKNPIDFLEAKGYKEVKKDLIIKLPKY |
| | | SLFELENGRKRMLASAGELQKGNELALPSK |
| | | YVNFLYLASHYEKLKGSGSSGSSGSETPGT |
| | | SESATPESGSSSGSEVEFSHEYWMRHALTL |
| | | AKRARDEREVPVGAVLVLNNRVIGEGWNRA |
| | | IGLHDPTAHAEIMALRQGGLVMQNYRLIDA |
| | | TLYVTFEPCVMCAGAMIHSRIGRVVFGVRN |
| | | AKTGAAGSLMDVLHYPGMNHRVEITEGILA |
| | | DECAALLCYFFRMRRPEDNEQKQLFVEQHK |
| | | HYLDEIIEQISEFSKRVILADANLDKVLSA |
| | | YNKHRDKPIREQAENIIHLFTLTNLGAPAA |
| | | FKYFDTTIDRKRYTSTKEVLDATLIHQSIT |
| | | GLYETRIDLSQLGGD |
| 110.5 Cas9 | 1329 | MDKKYSIGLAIGTNSVGWAVITDEYKVPSK |
| TadAins | | KFKVLGNTDRHSIKKNLIGALLFDSGETAE |
| delta 59- | | ATRLKRTARRRYTRRKNRICYLQEIFSNEM |
| 66 1250 | | AKVDDSFFHRLEESFLVEEDKKHERHPIFG |
| polypeptide | | NIVDEVAYHEKYPTIYHLRKKLVDSTDKAD |
| sequence | | LRLIYLALAHMIKFRGHFLIEGDLNPDNSD |
| | | VDKLFIQLVQTYNQLFEENPINASGVDAKA |
| | | ILSARLSKSRRLENLIAQLPGEKKNGLFGN |
| | | LIALSLGLTPNFKSNFDLAEDAKLQLSKDT |
| | | YDDDLDNLLAQIGDQYADLFLAAKNLSDAI |
| | | LLSDILRVNTEITKAPLSASMIKRYDEHHQ |
| | | DLTLLKALVRQQLPEKYKEIFFDQSKNGYA |
| | | GYIDGGASQEEFYKFIKPILEKMDGTEELL |
| | | VKLNREDLLRKQRTFDNGSIPHQIHLGELH |
| | | AILRRQEDFYPFLKDNREKIEKILTFRIPY |
| | | YVGPLARGNSRFAWMTRKSEETITPWNFEE |
| | | VVDKGASAQSFIERMTNFDKNLPNEKVLPK |
| | | HSLLYEYFTVYNELTKVKYVTEGMRKPAFL |
| | | SGEQKKAIVDLLFKTNRKVTVKQLKEDYFK |
| | | KIECFDSVEISGVEDRFNASLGTYHDLLKI |
| | | IKDKDFLDNEENEDILEDIVLTLTLFEDRE |
| | | MIEERLKTYAHLFDDKVMKQLKRRRYTGWG |
| | | RLSRKLINGIRDKQSGKTILDFLKSDGFAN |
| | | RNFMQLIHDDSLTFKEDIQKAQVSGQGDSL |
| | | HEHIANLAGSPAIKKGILQTVKVVDELVKV |
| | | MGRHKPENIVIEMARENQTTQKGQKNSRER |
| | | MKRIEEGIKELGSQILKEHPVENTQLQNEK |
| | | LYLYYLQNGRDMYVDQELDINRLSDYDVDH |
| | | IVPQSFLKDDSIDNKVLTRSDKNRGKSDNV |
| | | PSEEVVKKMKNYWRQLLNAKLITQRKFDNL |
| | | TKAERGGLSELDKAGFIKRQLVETRQITKH |
| | | VAQILDSRMNTKYDENDKLIREVKVITLKS |
| | | KLVSDFRKDFQFYKVREINNYHHAHDAYLN |
| | | AVVGTALIKKYPKLESEFVYGDYKVYDVRK |
| | | MIAKSEQEIGKATAKYFFYSNIMNFFKTEI |
| | | TLANGEIRKRPLIETNGETGEIVWDKGRDF |
| | | ATVRKVLSMPQVNIVKKTEVQTGGFSKESI |
| | | LPKRNSDKLIARKKDWDPKKYGGFDSPTVA |
| | | YSVLVVAKVEKGKSKKLKSVKELLGITIME |
| | | RSSFEKNPIDFLEAKGYKEVKKDLIIKLPK |
| | | YSLFELENGRKRMLASAGELQKGNELALPS |
| | | KYVNFLYLASHYEKLKGSPGSSGSSGSETP |
| | | GTSESATPESGSSGSEVEFSHEYWMRHALT |
| | | LAKRARDEREVPVGAVLVLNNRVIGEGWNR |
| | | AHAEIMALRQGGLVMQNYRLIDATLYVTFE |
| | | PCVMCAGAMIHSRIGRWFGVRNAKTGAAGS |
| | | LMDVLHYPGMNHRVEITEGILADECAALLC |
| | | YFFRMPRQVFNAQKKAQSSTDEDNEQKQLF |
| | | VEQHKHYLDEIIEQISEFSKRVILADANLD |
| | | KVLSAYNKHRDKPIREQAENIIHLFTLTNL |
| | | GAPAAFKYFDTTIDRKRYTSTKEVLDATLI |
| | | HQSITGLYETRIDLSQLGGD |
| 110.6 Cas9 | 1330 | MDKKYSIGLAIGTNSVGWAVITDEYKVPSK |
| TadAins 1251 | | KFKVLGNTDRHSIKKNLIGALLFDSGETAE |
| polypeptide | | ATRLKRTARRRYTRRKNRICYLQEIFSNEM |
| sequence | | AKVDDSFFHRLEESFLVEEDKKHERHPIFG |
| | | NIVDEVAYHEKYPTIYHLRKKLVDSTDKAD |
| | | LRLIYLALAHMIKFRGHFLIEGDLNPDNSD |
| | | VDKLFIQLVQTYNQLFEENPINASGVDAKA |
| | | ILSARLSKSRRLENLIAQLPGEKKNGLFGN |
| | | LIALSLGLTPNFKSNFDLAEDAKLQLSKDT |
| | | YDDDLDNLLAQIGDQYADLFLAAKNLSDAI |
| | | LLSDILRVNTEITKAPLSASMIKRYDEHHQ |
| | | DLTLLKALVRQQLPEKYKEIFFDQSKNGYA |
| | | GYIDGGASQEEFYKFIKPILEKMDGTEELL |
| | | VKLNREDLLRKQRTFDNGSIPHQIHLGELH |
| | | AILRRQEDFYPFLKDNREKIEKILTFRIPY |
| | | YVGPLARGNSRFAWMTRKSEETITPWNFEE |
| | | VVDKGASAQSFIERMTNFDKNLPNEKVLPK |
| | | HSLLYEYFTVYNELTKVKYVTEGMRKPAFL |
| | | SGEQKKAIVDLLFKTNRKVTVKQLKEDYFK |
| | | KIECFDSVEISGVEDRFNASLGTYHDLLKI |
| | | IKDKDFLDNEENEDILEDIVLTLTLFEDRE |
| | | MIEERLKTYAHLFDDKVMKQLKRRRYTGWG |
| | | RLSRKLINGIRDKQSGKTILDFLKSDGFAN |
| | | RNFMQLIHDDSLTFKEDIQKAQVSGQGDSL |
| | | HEHIANLAGSPAIKKGILQTVKVVDELVKV |
| | | MGRHKPENIVIEMARENQTTQKGQKNSRER |
| | | MKRIEEGIKELGSQILKEHPVENTQLQNEK |
| | | LYLYYLQNGRDMYVDQELDINRLSDYDVDH |
| | | IVPQSFLKDDSIDNKVLTRSDKNRGKSDNV |
| | | PSEEVVKKMKNYWRQLLNAKLITQRKFDNL |
| | | TKAERGGLSELDKAGFIKRQLVETRQITKH |
| | | VAQILDSRMNTKYDENDKLIREVKVITLKS |
| | | KLVSDFRKDFQFYKVREINNYHHAHDAYLN |
| | | AVVGTALIKKYPKLESEFVYGDYKVYDVRK |
| | | MIAKSEQEIGKATAKYFFYSNIMNFFKTEI |
| | | TLANGEIRKRPLIETNGETGEIVWDKGRDF |
| | | ATVRKVLSMPQVNIVKKTEVQTGGFSKESI |
| | | LPKRNSDKLIARKKDWDPKKYGGFDSPTVA |
| | | YSVLVVAKVEKGKSKKLKSVKELLGITIME |
| | | RSSFEKNPIDFLEAKGYKEVKKDLIIKLPK |
| | | YSLFELENGRKRMLASAGELQKGNELALPS |
| | | KYVNFLYLASHYEKLKGSPEGSSGSSGSET |
| | | PGTSESATPESGSSSGSEVEFSHEYWMRHA |
| | | LTLAKRARDEREVPVGAVLVLNNRVIGEGW |
| | | NRAIGLHDPTAHAEIMALRQGGLVMQNYRL |
| | | IDATLYVTFEPCVMCAGAMIHSRIGRVVFG |
| | | VRNAKTGAAGSLMDVLHYPGMNHRVEITEG |
| | | ILADECAALLCYFFRMRRDNEQKQLFVEQH |
| | | KHYLDEIIEQISEFSKRVILADANLDKVLS |
| | | AYNKHRDKPIREQAENIIHLFTLTNLGAPA |
| | | AFKYFDTTIDRKRYTSTKEVLDATLIHQSI |
| | | TGLYETRIDLSQLGGD |
| 110.7 Cas9 | 1331 | MDKKYSIGLAIGTNSVGWAVITDEYKVPSK |
| TadAins 1252 | | KFKVLGNTDRHSIKKNLIGALLFDSGETAE |
| polypeptide | | ATRLKRTARRRYTRRKNRICYLQEIFSNEM |
| sequence | | AKVDDSFFHRLEESFLVEEDKKHERHPIFG |
| | | NIVDEVAYHEKYPTIYHLRKKLVDSTDKAD |
| | | LRLIYLALAHMIKFRGHFLIEGDLNPDNSD |
| | | VDKLFIQLVQTYNQLFEENPINASGVDAKA |
| | | ILSARLSKSRRLENLIAQLPGEKKNGLFGN |
| | | LIALSLGLTPNFKSNFDLAEDAKLQLSKDT |
| | | YDDDLDNLLAQIGDQYADLFLAAKNLSDAI |
| | | LLSDILRVNTEITKAPLSASMIKRYDEHHQ |
| | | DLTLLKALVRQQLPEKYKEIFFDQSKNGYA |
| | | GYIDGGASQEEFYKFIKPILEKMDGTEELL |
| | | VKLNREDLLRKQRTFDNGSIPHQIHLGELH |
| | | AILRRQEDFYPFLKDNREKIEKILTFRIPY |
| | | YVGPLARGNSRFAWMTRKSEETITPWNFEE |
| | | VVDKGASAQSFIERMTNFDKNLPNEKVLPK |
| | | HSLLYEYFTVYNELTKVKYVTEGMRKPAFL |
| | | SGEQKKAIVDLLFKTNRKVTVKQLKEDYFK |
| | | KIECFDSVEISGVEDRFNASLGTYHDLLKI |
| | | IKDKDFLDNEENEDILEDIVLTLTLFEDRE |
| | | MIEERLKTYAHLFDDKVMKQLKRRRYTGWG |
| | | RLSRKLINGIRDKQSGKTILDFLKSDGFAN |
| | | RNFMQLIHDDSLTFKEDIQKAQVSGQGDSL |
| | | HEHIANLAGSPAIKKGILQTVKVVDELVKV |
| | | MGRHKPENIVIEMARENQTTQKGQKNSRER |
| | | MKRIEEGIKELGSQILKEHPVENTQLQNEK |
| | | LYLYYLQNGRDMYVDQELDINRLSDYDVDH |
| | | IVPQSFLKDDSIDNKVLTRSDKNRGKSDNV |
| | | PSEEVVKKMKNYWRQLLNAKLITQRKFDNL |
| | | TKAERGGLSELDKAGFIKRQLVETRQITKH |
| | | VAQILDSRMNTKYDENDKLIREVKVITLKS |
| | | KLVSDFRKDFQFYKVREINNYHHAHDAYLN |
| | | AVVGTALIKKYPKLESEFVYGDYKVYDVRK |
| | | MIAKSEQEIGKATAKYFFYSNIMNFFKTEI |
| | | TLANGEIRKRPLIETNGETGEIVWDKGRDF |
| | | ATVRKVLSMPQVNIVKKTEVQTGGFSKESI |
| | | LPKRNSDKLIARKKDWDPKKYGGFDSPTVA |
| | | YSVLVVAKVEKGKSKKLKSVKELLGITIME |
| | | RSSFEKNPIDFLEAKGYKEVKKDLIIKLPK |
| | | YSLFELENGRKRMLASAGELQKGNELALPS |
| | | KYVNFLYLASHYEKLKGSPEDGSSGSSGSE |
| | | TPGTSESATPESGSSSGSEVEFSHEYWMRH |
| | | ALTLAKRARDEREVPVGAVLVLNNRVIGEG |
| | | WNRAIGLHDPTAHAEIMALRQGGLVMQNYR |
| | | LIDATLYVTFEPCVMCAGAMIHSRIGRVVF |
| | | GVRNAKTGAAGSLMDVLHYPGMNHRVEITE |
| | | GILADECAALLCYFFRMRRNEQKQLFVEQH |
| | | KHYLDEIIEQISEFSKRVILADANLDKVLS |
| | | AYNKHRDKPIREQAENIIHLFTLTNLGAPA |
| | | AFKYFDTTIDRKRYTSTKEVLDATLIHQSI |
| | | TGLYETRIDLSQLGGD |
| 110.8 Cas9 | 1332 | MDKKYSIGLAIGTNSVGWAVITDEYKVPSK |
| TadAins | | KFKVLGNTDRHSIKKNLIGALLFDSGETAE |
| delta 59-66 | | ATRLKRTARRRYTRRKNRICYLQEIFSNEM |
| C-truncate | | AKVDDSFFHRLEESFLVEEDKKHERHPIFG |
| 1250 | | NIVDEVAYHEKYPTIYHLRKKLVDSTDKAD |
| polypeptide | | LRLIYLALAHMIKFRGHFLIEGDLNPDNSD |
| sequence | | VDKLFIQLVQTYNQLFEENPINASGVDAKA |
| | | ILSARLSKSRRLENLIAQLPGEKKNGLFGN |
| | | LIALSLGLTPNFKSNFDLAEDAKLQLSKDT |
| | | YDDDLDNLLAQIGDQYADLFLAAKNLSDAI |
| | | LLSDILRVNTEITKAPLSASMIKRYDEHHQ |
| | | DLTLLKALVRQQLPEKYKEIFFDQSKNGYA |
| | | GYIDGGASQEEFYKFIKPILEKMDGTEELL |
| | | VKLNREDLLRKQRTFDNGSIPHQIHLGELH |
| | | AILRRQEDFYPFLKDNREKIEKILTFRIPY |
| | | YVGPLARGNSRFAWMTRKSEETITPWNFEE |
| | | VVDKGASAQSFIERMTNFDKNLPNEKVLPK |
| | | HSLLYEYFTVYNELTKVKYVTEGMRKPAFL |
| | | SGEQKKAIVDLLFKTNRKVTVKQLKEDYFK |
| | | KIECFDSVEISGVEDRFNASLGTYHDLLKI |
| | | IKDKDFLDNEENEDILEDIVLTLTLFEDRE |
| | | MIEERLKTYAHLFDDKVMKQLKRRRYTGWG |
| | | RLSRKLINGIRDKQSGKTILDFLKSDGFAN |
| | | RNFMQLIHDDSLTFKEDIQKAQVSGQGDSL |
| | | HEHIANLAGSPAIKKGILQTVKWDELVKVM |
| | | GRHKPENIVIEMARENQTTQKGQKNSRERM |
| | | KRIEEGIKELGSQILKEHPVENTQLQNEKL |
| | | YLYYLQNGRDMYVDQELDINRLSDYDVDHI |
| | | VPQSFLKDDSIDNKVLTRSDKNRGKSDNVP |
| | | SEEVVKKMKNYWRQLLNAKLITQRKFDNLT |
| | | KAERGGLSELDKAGFIKRQLVETRQITKHV |
| | | AQILDSRMNTKYDENDKLIREVKVITLKSK |
| | | LVSDFRKDFQFYKVREINNYHHAHDAYLNA |
| | | VVGTALIKKYPKLESEFVYGDYKVYDVRKM |
| | | IAKSEQEIGKATAKYFFYSNIMNFFKTEIT |
| | | LANGEIRKRPLIETNGETGEIVWDKGRDFA |
| | | TVRKVLSMPQVNIVKKTEVQTGGFSKESIL |
| | | PKRNSDKLIARKKDWDPKKYGGFDSPTVAY |
| | | SVLVVAKVEKGKSKKLKSVKELLGITIMER |
| | | SSFEKNPIDFLEAKGYKEVKKDLIIKLPKY |
| | | SLFELENGRKRMLASAGELQKGNELALPSK |
| | | YVNFLYLASHYEKLKGSPGSSGSETPGTSE |
| | | SATPESSGSEVEFSHEYWMRHALTLAKRAR |
| | | DEREVPVGAVLVLNNRVIGEGWNRAHAEIM |
| | | ALRQGGLVMQNYRLIDATLYVTFEPCVMCA |
| | | GAMIHSRIGRVVFGVRNAKTGAAGSLMDVL |
| | | HYPGMNHRVEITEGILADECAALLCYFFRM |
| | | PRQEDNEQKQLFVEQHKHYLDEIIEQISEF |
| | | SKRVILADANLDKVLSAYNKHRDKPIREQA |
| | | ENIIHLFTLTNLGAPAAFKYFDTTIDRKRY |
| | | TSTKEVLDATLIHQSITGLYETRIDLSQLG |
| | | GD |
| 111.1 Cas9 | 1333 | MDKKYSIGLAIGTNSVGWAVITDEYKVPSK |
| TadAins 997 | | KFKVLGNTDRHSIKKNLIGALLFDSGETAE |
| polypeptide | | ATRLKRTARRRYTRRKNRICYLQEIFSNEM |
| sequence | | AKVDDSFFHRLEESFLVEEDKKHERHPIFG |
| | | NIVDEVAYHEKYPTIYHLRKKLVDSTDKAD |
| | | LRLIYLALAHMIKFRGHFLIEGDLNPDNSD |
| | | VDKLFIQLVQTYNQLFEENPINASGVDAKA |
| | | ILSARLSKSRRLENLIAQLPGEKKNGLFGN |
| | | LIALSLGLTPNFKSNFDLAEDAKLQLSKDT |
| | | YDDDLDNLLAQIGDQYADLFLAAKNLSDAI |
| | | LLSDILRVNTEITKAPLSASMIKRYDEHHQ |
| | | DLTLLKALVRQQLPEKYKEIFFDQSKNGYA |
| | | GYIDGGASQEEFYKFIKPILEKMDGTEELL |
| | | VKLNREDLLRKQRTFDNGSIPHQIHLGELH |
| | | AILRRQEDFYPFLKDNREKIEKILTFRIPY |
| | | YVGPLARGNSRFAWMTRKSEETITPWNFEE |
| | | VVDKGASAQSFIERMTNFDKNLPNEKVLPK |
| | | HSLLYEYFTVYNELTKVKYVTEGMRKPAFL |
| | | SGEQKKAIVDLLFKTNRKVTVKQLKEDYFK |
| | | KIECFDSVEISGVEDRFNASLGTYHDLLKI |
| | | IKDKDFLDNEENEDILEDIVLTLTLFEDRE |
| | | MIEERLKTYAHLFDDKVMKQLKRRRYTGWG |
| | | RLSRKLINGIRDKQSGKTILDFLKSDGFAN |
| | | RNFMQLIHDDSLTFKEDIQKAQVSGQGDSL |
| | | HEHIANLAGSPAIKKGILQTVKWDELVKVM |
| | | GRHKPENIVIEMARENQTTQKGQKNSRERM |
| | | KRIEEGIKELGSQILKEHPVENTQLQNEKL |
| | | YLYYLQNGRDMYVDQELDINRLSDYDVDHI |
| | | VPQSFLKDDSIDNKVLTRSDKNRGKSDNVP |
| | | SEEVVKKMKNYWRQLLNAKLITQRKFDNLT |
| | | KAERGGLSELDKAGFIKRQLVETRQITKHV |
| | | AQILDSRMNTKYDENDKLIREVKVITLKSK |
| | | LVSDFRKDFQFYKVREINNYHHAHDAYLNA |
| | | VVGTALSHEYWMRHALTLAKRARDEREVPV |
| | | GAVLVLNNRVIGEGWNRAIGLHDPTAHAEI |
| | | MALRQGGLVMQNYRLIDATLYVTFEPCVMC |
| | | AGAMIHSRIGRVVFGVRNAKTGAAGSLMDV |
| | | LHYPGMNHRVEITEGILADECAALLCYFFR |
| | | MPRQVFNAQKKAQSSTDGSSGSETPGTSES |
| | | ATPESSGIKKYPKLESEFVYGDYKVYDVRK |
| | | MIAKSEQEIGKATAKYFFYSNIMNFFKTEI |
| | | TLANGEIRKRPLIETNGETGEIVWDKGRDF |
| | | ATVRKVLSMPQVNIVKKTEVQTGGFSKESI |
| | | LPKRNSDKLIARKKDWDPKKYGGFDSPTVA |
| | | YSVLVVAKVEKGKSKKLKSVKELLGITIME |
| | | RSSFEKNPIDFLEAKGYKEVKKDLIIKLPK |
| | | YSLFELENGRKRMLASAGELQKGNELALPS |
| | | KYVNFLYLASHYEKLKGSPEDNEQKQLFVE |
| | | QHKHYLDEIIEQISEFSKRVILADANLDKV |
| | | LSAYNKHRDKPIREQAENIIHLFTLTNLGA |
| | | PAAFKYFDTTIDRKRYTSTKEVLDATLIHQ |
| | | SITGLYETRIDLSQLGGD |
| 111.2 Cas9 | 1334 | MDKKYSIGLAIGTNSVGWAVITDEYKVPSK |
| TadAins 997 | | KFKVLGNTDRHSIKKNLIGALLFDSGETAE |
| polypeptide | | ATRLKRTARRRYTRRKNRICYLQEIFSNEM |
| sequence | | AKVDDSFFHRLEESFLVEEDKKHERHPIFG |
| | | NIVDEVAYHEKYPTIYHLRKKLVDSTDKAD |
| | | LRLIYLALAHMIKFRGHFLIEGDLNPDNSD |
| | | VDKLFIQLVQTYNQLFEENPINASGVDAKA |
| | | ILSARLSKSRRLENLIAQLPGEKKNGLFGN |
| | | LIALSLGLTPNFKSNFDLAEDAKLQLSKDT |
| | | YDDDLDNLLAQIGDQYADLFLAAKNLSDAI |
| | | LLSDILRVNTEITKAPLSASMIKRYDEHHQ |
| | | DLTLLKALVRQQLPEKYKEIFFDQSKNGYA |
| | | GYIDGGASQEEFYKFIKPILEKMDGTEELL |
| | | VKLNREDLLRKQRTFDNGSIPHQIHLGELH |
| | | AILRRQEDFYPFLKDNREKIEKILTFRIPY |
| | | YVGPLARGNSRFAWMTRKSEETITPWNFEE |
| | | VVDKGASAQSFIERMTNFDKNLPNEKVLPK |
| | | HSLLYEYFTVYNELTKVKYVTEGMRKPAFL |
| | | SGEQKKAIVDLLFKTNRKVTVKQLKEDYFK |
| | | KIECFDSVEISGVEDRFNASLGTYHDLLKI |
| | | IKDKDFLDNEENEDILEDIVLTLTLFEDRE |
| | | MIEERLKTYAHLFDDKVMKQLKRRRYTGWG |
| | | RLSRKLINGIRDKQSGKTILDFLKSDGFAN |
| | | RNFMQLIHDDSLTFKEDIQKAQVSGQGDSL |
| | | HEHIANLAGSPAIKKGILQTVKVVDELVKV |
| | | MGRHKPENIVIEMARENQTTQKGQKNSRER |
| | | MKRIEEGIKELGSQILKEHPVENTQLQNEK |
| | | LYLYYLQNGRDMYVDQELDINRLSDYDVDH |
| | | IVPQSFLKDDSIDNKVLTRSDKNRGKSDNV |
| | | PSEEWKKMKNYWRQLLNAKLITQRKFDNLT |
| | | KAERGGLSELDKAGFIKRQLVETRQITKHV |
| | | AQILDSRMNTKYDENDKLIREVKVITLKSK |
| | | LVSDFRKDFQFYKVREINNYHHAHDAYLNA |
| | | VVGTALSHEYWMRHALTLAKRARDEREVPV |
| | | GAVLVLNNRVIGEGWNRAIGLHDPTAHAEI |
| | | MALRQGGLVMQNYRLIDATLYVTFEPCVMC |
| | | AGAMIHSRIGRWFGVRNAKTGAAGSLMDVL |
| | | HYPGMNHRVEITEGILADECAALLCYFFRM |
| | | PRQVFNAQKKAQSSTDGSSGSSGSETPGTS |
| | | ESATPESSGGSSIKKYPKLESEFVYGDYKV |
| | | YDVRKMIAKSEQEIGKATAKYFFYSNIMNF |
| | | FKTEITLANGEIRKRPLIETNGETGEIVWD |
| | | KGRDFATVRKVLSMPQVNIVKKTEVQTGGF |
| | | SKESILPKRNSDKLIARKKDWDPKKYGGFD |
| | | SPTVAYSVLWAKVEKGKSKKLKSVKELLGI |
| | | TIMERSSFEKNPIDFLEAKGYKEVKKDLII |
| | | KLPKYSLFELENGRKRMLASAGELQKGNEL |
| | | ALPSKYVNFLYLASHYEKLKGSPEDNEQKQ |
| | | LFVEQHKHYLDEIIEQISEFSKRVILADAN |
| | | LDKVLSAYNKHRDKPIREQAENIIHLFTLT |
| | | NLGAPAAFKYFDTTIDRKRYTSTKEVLDAT |
| | | LIHQSITGLYETRIDLSQLGGD |
| 112 delta | 1335 | MDKKYSIGLAIGTNSVGWAVITDEYKVPSK |
| HNH | | KFKVLGNTDRHSIKKNLIGALLFDSGETAE |
| TadA | | ATRLKRTARRRYTRRKNRICYLQEIFSNEM |
| polypeptide | | AKVDDSFFHRLEESFLVEEDKKHERHPIFG |
| sequence | | NIVDEVAYHEKYPTIYHLRKKLVDSTDKAD |
| | | LRLIYLALAHMIKFRGHFLIEGDLNPDNSD |
| | | VDKLFIQLVQTYNQLFEENPINASGVDAKA |
| | | ILSARLSKSRRLENLIAQLPGEKKNGLFGN |
| | | LIALSLGLTPNFKSNFDLAEDAKLQLSKDT |
| | | YDDDLDNLLAQIGDQYADLFLAAKNLSDAI |
| | | LLSDILRVNTEITKAPLSASMIKRYDEHHQ |
| | | DLTLLKALVRQQLPEKYKEIFFDQSKNGYA |
| | | GYIDGGASQEEFYKFIKPILEKMDGTEELL |
| | | VKLNREDLLRKQRTFDNGSIPHQIHLGELH |
| | | AILRRQEDFYPFLKDNREKIEKILTFRIPY |
| | | YVGPLARGNSRFAWMTRKSEETITPWNFEE |
| | | VVDKGASAQSFIERMTNFDKNLPNEKVLPK |
| | | HSLLYEYFTVYNELTKVKYVTEGMRKPAFL |
| | | SGEQKKAIVDLLFKTNRKVTVKQLKEDYFK |
| | | KIECFDSVEISGVEDRFNASLGTYHDLLKI |
| | | IKDKDFLDNEENEDILEDIVLTLTLFEDRE |
| | | MIEERLKTYAHLFDDKVMKQLKRRRYTGWG |
| | | RLSRKLINGIRDKQSGKTILDFLKSDGFAN |
| | | RNFMQLIHDDSLTFKEDIQKAQVSGQGDSL |
| | | HEHIANLAGSPAIKKGILQTVKVVDELVKV |
| | | MGRHKPENIVIEMARENQTTQKGQKNSRER |
| | | MKRIEEGIKELGSEVEFSHEYWMRHALTLA |
| | | KRARDEREVPVGAVLVLNNRVIGEGWNRAI |
| | | GLHDPTAHAEIMALRQGGLVMQNYRLIDAT |
| | | LYVTFEPCVMCAGAMIHSRIGRVVFGVRNA |
| | | KTGAAGSLMDVLHYPGMNHRVEITEGILAD |
| | | ECAALLCYFFRMPRQVFNAQKKAQSSTDGG |
| | | LSELDKAGFIKRQLVETRQITKHVAQILDS |
| | | RMNTKYDENDKLIREVKVITLKSKLVSDFR |
| | | KDFQFYKVREINNYHHAHDAYLNAVVGTAL |
| | | IKKYPKLESEFVYGDYKVYDVRKMIAKSEQ |
| | | EIGKATAKYFFYSNIMNFFKTEITLANGEI |
| | | RKRPLIETNGETGEIVWDKGRDFATVRKVL |
| | | SMPQVNIVKKTEVQTGGFSKESILPKRNSD |
| | | KLIARKKDWDPKKYGGFDSPTVAYSVLVVA |
| | | KVEKGKSKKLKSVKELLGITIMERSSFEKN |
| | | PIDFLEAKGYKEVKKDLIIKLPKYSLFELE |
| | | NGRKRMLASAGELQKGNELALPSKYVNFLY |
| | | LASHYEKLKGSPEDNEQKQLFVEQHKHYLD |
| | | EIIEQISEFSKRVILADANLDKVLSAYNKH |
| | | RDKPIREQAENIIHLFTLTNLGAPAAFKYF |
| | | DTTIDRKRYTSTKEVLDATLIHQSITGLYE |
| | | TRIDLSQLGGD |
| 113 N-term | 1336 | MSEVEFSHEYWMRHALTLAKRARDEREVPV |
| single | | GAVLVLNNRVIGEGWNRAIGLHDPTAHAEI |
| TadA helix | | MALRQGGLVMQNYRLIDATLYVTFEPCVMC |
| trunc | | AGAMIHSRIGRVVFGVRNAKTGAAGSLMDV |
| 165-end | | LHYPGMNHRVEITEGILADECAALLCYFFR |
| polypeptide | | MPRSGGSSGGSSGSETPGTSESATPESSGG |
| sequence | | SSGGSDKKYSIGLAIGTNSVGWAVITDEYK |
| | | VPSKKFKVLGNTDRHSIKKNLIGALLFDSG |
| | | ETAEATRLKRTARRRYTRRKNRICYLQEIF |
| | | SNEMAKVDDSFFHRLEESFLVEEDKKHERH |
| | | PIFGNIVDEVAYHEKYPTIYHLRKKLVDST |
| | | DKADLRLIYLALAHMIKFRGHFLIEGDLNP |
| | | DNSDVDKLFIQLVQTYNQLFEENPINASGV |
| | | DAKAILSARLSKSRRLENLIAQLPGEKKNG |
| | | LFGNLIALSLGLTPNFKSNFDLAEDAKLQL |
| | | SKDTYDDDLDNLLAQIGDQYADLFLAAKNL |
| | | SDAILLSDILRVNTEITKAPLSASMIKRYD |
| | | EHHQDLTLLKALVRQQLPEKYKEIFFDQSK |
| | | NGYAGYIDGGASQEEFYKFIKPILEKMDGT |
| | | EELLVKLNREDLLRKQRTFDNGSIPHQIHL |
| | | GELHAILRRQEDFYPFLKDNREKIEKILTF |
| | | RIPYYVGPLARGNSRFAWMTRKSEETITPW |
| | | NFEEVVDKGASAQSFIERMTNFDKNLPNEK |
| | | VLPKHSLLYEYFTVYNELTKVKYVTEGMRK |
| | | PAFLSGEQKKAIVDLLFKTNRKVTVKQLKE |
| | | DYFKKIECFDSVEISGVEDRFNASLGTYHD |
| | | LLKIIKDKDFLDNEENEDILEDIVLTLTLF |
| | | EDREMIEERLKTYAHLFDDKVMKQLKRRRY |
| | | TGWGRLSRKLINGIRDKQSGKTILDFLKSD |
| | | GFANRNFMQLIHDDSLTFKEDIQKAQVSGQ |
| | | GDSLHEHIANLAGSPAIKKGILQTVKVVDE |
| | | LVKVMGRHKPENIVIEMARENQTTQKGQKN |
| | | SRERMKRIEEGIKELGSQILKEHPVENTQL |
| | | QNEKLYLYYLQNGRDMYVDQELDINRLSDY |
| | | DVDHIVPQSFLKDDSIDNKVLTRSDKNRGK |
| | | SDNVPSEEWKKMKNYWRQLLNAKLITQRKF |
| | | DNLTKAERGGLSELDKAGFIKRQLVETRQI |
| | | TKHVAQILDSRMNTKYDENDKLIREVKVIT |
| | | LKSKLVSDFRKDFQFYKVREINNYHHAHDA |
| | | YLNAVVGTALIKKYPKLESEFVYGDYKVYD |
| | | VRKMIAKSEQEIGKATAKYFFYSNIMNFFK |
| | | TEITLANGEIRKRPLIETNGETGEIVWDKG |
| | | RDFATVRKVLSMPQVNIVKKTEVQTGGFSK |
| | | ESILPKRNSDKLIARKKDWDPKKYGGFDSP |
| | | TVAYSVLWAKVEKGKSKKLKSVKELLGITI |
| | | MERSSFEKNPIDFLEAKGYKEVKKDLIIKL |
| | | PKYSLFELENGRKRMLASAGELQKGNELAL |
| | | PSKYVNFLYLASHYEKLKGSPEDNEQKQLF |
| | | VEQHKHYLDEIIEQISEFSKRVILADANLD |
| | | KVLSAYNKHRDKPIREQAENIIHLFTLTNL |
| | | GAPAAFKYFDTTIDRKRYTSTKEVLDATLI |
| | | HQSITGLYETRIDLSQLGGD |
| 114 N-term | 1337 | MSEVEFSHEYWMRHALTLAKRARDEREVPV |
| single | | GAVLVLNNRVIGEGWNRTAHAEIMALRQGG |
| TadA helix | | LVMQNYRLIDATLYVTFEPCVMCAGAMIHS |
| trunc | | RIGRWFGVRNAKTGAAGSLMDVLHYPGMNH |
| 165-end | | RVEITEGILADECAALLCYFFRMPRSGGSS |
| delta | | GGSSGSETPGTSESATPESSGGSSGGSDKK |
| 59-65 | | YSIGLAIGTNSVGWAVITDEYKVPSKKFKV |
| polypeptide | | LGNTDRHSIKKNLIGALLFDSGETAEATRL |
| sequence | | KRTARRRYTRRKNRICYLQEIFSNEMAKVD |
| | | DSFFHRLEESFLVEEDKKHERHPIFGNIVD |
| | | EVAYHEKYPTIYHLRKKLVDSTDKADLRLI |
| | | YLALAHMIKFRGHFLIEGDLNPDNSDVDKL |
| | | FIQLVQTYNQLFEENPINASGVDAKAILSA |
| | | RLSKSRRLENLIAQLPGEKKNGLFGNLIAL |
| | | SLGLTPNFKSNFDLAEDAKLQLSKDTYDDD |
| | | LDNLLAQIGDQYADLFLAAKNLSDAILLSD |
| | | ILRVNTEITKAPLSASMIKRYDEHHQDLTL |
| | | LKALVRQQLPEKYKEIFFDQSKNGYAGYID |
| | | GGASQEEFYKFIKPILEKMDGTEELLVKLN |
| | | REDLLRKQRTFDNGSIPHQIHLGELHAILR |
| | | RQEDFYPFLKDNREKIEKILTFRIPYYVGP |
| | | LARGNSRFAWMTRKSEETITPWNFEEVVDK |
| | | GASAQSFIERMTNFDKNLPNEKVLPKHSLL |
| | | YEYFTVYNELTKVKYVTEGMRKPAFLSGEQ |
| | | KKAIVDLLFKTNRKVTVKQLKEDYFKKIEC |
| | | FDSVEISGVEDRFNASLGTYHDLLKIIKDK |
| | | DFLDNEENEDILEDIVLTLTLFEDREMIEE |
| | | RLKTYAHLFDDKVMKQLKRRRYTGWGRLSR |
| | | KLINGIRDKQSGKTILDFLKSDGFANRNFM |
| | | QLIHDDSLTFKEDIQKAQVSGQGDSLHEHI |
| | | ANLAGSPAIKKGILQTVKWDELVKVMGRHK |
| | | PENIVIEMARENQTTQKGQKNSRERMKRIE |
| | | EGIKELGSQILKEHPVENTQLQNEKLYLYY |
| | | LQNGRDMYVDQELDINRLSDYDVDHIVPQS |
| | | FLKDDSIDNKVLTRSDKNRGKSDNVPSEEW |
| | | KKMKNYWRQLLNAKLITQRKFDNLTKAERG |
| | | GLSELDKAGFIKRQLVETRQITKHVAQILD |
| | | SRMNTKYDENDKLIREVKVITLKSKLVSDF |
| | | RKDFQFYKVREINNYHHAHDAYLNAVVGTA |
| | | LIKKYPKLESEFVYGDYKVYDVRKMIAKSE |
| | | QEIGKATAKYFFYSNIMNFFKTEITLANGE |
| | | IRKRPLIETNGETGEIVWDKGRDFATVRKV |
| | | LSMPQVNIVKKTEVQTGGFSKESILPKRNS |
| | | DKLIARKKDWDPKKYGGFDSPTVAYSVLVV |
| | | AKVEKGKSKKLKSVKELLGITIMERSSFEK |
| | | NPIDFLEAKGYKEVKKDLIIKLPKYSLFEL |
| | | ENGRKRMLASAGELQKGNELALPSKYVNFL |
| | | YLASHYEKLKGSPEDNEQKQLFVEQHKHYL |
| | | DEIIEQISEFSKRVILADANLDKVLSAYNK |
| | | HRDKPIREQAENIIHLFTLTNLGAPAAFKY |
| | | FDTTIDRKRYTSTKEVLDATLIHQSITGLY |
| | | ETRIDLSQLGGD |
| 115.1 Cas9 | 1338 | MDKKYSIGLAIGTNSVGWAVITDEYKVPSK |
| TadAins1004 | | KFKVLGNTDRHSIKKNLIGALLFDSGETAE |
| polypeptide | | ATRLKRTARRRYTRRKNRICYLQEIFSNEM |
| sequence | | AKVDDSFFHRLEESFLVEEDKKHERHPIFG |
| | | NIVDEVAYHEKYPTIYHLRKKLVDSTDKAD |
| | | LRLIYLALAHMIKFRGHFLIEGDLNPDNSD |
| | | VDKLFIQLV |
| | | QTYNQLFEENPINASGVDAKAILSARLSKS |
| | | RRLENLIAQLPGEKKNGLFGNLIALSLGLT |
| | | PNFKSNFDLAEDAKLQLSKDTYDDDLDNLL |
| | | AQIGDQYADLFLAAKNLSDAILLSDILRVN |
| | | TEITKAPLSASMIKRYDEHHQDLTLLKALV |
| | | RQQLPEKYKEIFFDQSKNGYAGYIDGGASQ |
| | | EEFYKFIKPILEKMDGTEELLVKLNREDLL |
| | | RKQRTFDNGSIPHQIHLGELHAILRRQEDF |
| | | YPFLKDNREKIEKILTFRIPYYVGPLARGN |
| | | SRFAWMTRKSEETITPWNFEEVVDKGASAQ |
| | | SFIERMTNFDKNLPNEKVLPKHSLLYEYFT |
| | | VYNELTKVKYVTEGMRKPAFLSGEQKKAIV |
| | | DLLFKTNRKVTVKQLKEDYFKKIECFDSVE |
| | | ISGVEDRFNASLGTYHDLLKIIKDKDFLDN |
| | | EENEDILEDIVLTLTLFEDREMIEERLKTY |
| | | AHLFDDKVMKQLKRRRYTGWGRLSRKLING |
| | | IRDKQSGKTILDFLKSDGFANRNFMQLIHD |
| | | DSLTFKEDIQKAQVSGQGDSLHEHIANLAG |
| | | SPAIKKGILQTVKVVDELVKVMGRHKPENI |
| | | VIEMARENQTTQKGQKNSRERMKRIEEGIK |
| | | ELGSQILKEHPVENTQLQNEKLYLYYLQNG |
| | | RDMYVDQELDINRLSDYDVDHIVPQSFLKD |
| | | DSIDNKVLTRSDKNRGKSDNVPSEEVVKKM |
| | | KNYWRQLLNAKLITQRKFDNLTKAERGGLS |
| | | ELDKAGFIKRQLVETRQITKHVAQILDSRM |
| | | NTKYDENDKLIREVKVITLKSKLVSDFRKD |
| | | FQFYKVREINNYHHAHDAYLNAVVGTALIK |
| | | KYPKGSSGSETPGTSESATPESSGSEVEFS |
| | | HEYWMRHALTLAKRARDEREVPVGAVLVLN |
| | | NRVIGEGWNRAIGLHDPTAHAEIMALRQGG |
| | | LVMQNYRLIDATLYVTFEPCVMCAGAMIHS |
| | | RIGRVVFGVRNAKTGAAGSLMDVLHYPGMN |
| | | HRVEITEGILADECAALLCYFFRMPRQLES |
| | | EFVYGDYKVYDVRKMIAKSEQEIGKATAKY |
| | | FFYSNIMNFFKTEITLANGEIRKRPLIETN |
| | | GETGEIVWDKGRDFATVRKVLSMPQVNIVK |
| | | KTEVQTGGFSKESILPKRNSDKLIARKKDW |
| | | DPKKYGGFDSPTVAYSVLVVAKVEKGKSKK |
| | | LKSVKELLGITIMERSSFEKNPIDFLEAKG |
| | | YKEVKKDLIIKLPKYSLFELENGRKRMLAS |
| | | AGELQKGNELALPSKYVNFLYLASHYEKLK |
| | | GSPEDNEQKQLFVEQHKHYLDEIIEQISEF |
| | | SKRVILADANLDKVLSAYNKHRDKPIREQA |
| | | ENIIHLFTLTNLGAPAAFKYFDTTIDRKRY |
| | | TSTKEVLDATLIHQSITGLYETRIDLSQLG |
| | | GD |
| 115.2 Cas9 | 1339 | MDKKYSIGLMGTNSVGWAVITDEYKVPSKK |
| TadAins1005 | | FKVLGNTDRHSIKKNLIGALLFDSGETAEA |
| polypeptide | | TRLKRTARRRYTRRKNRICYLQEIFSNEMA |
| sequence | | KVDDSFFHRLEESFLVEEDKKHERHPIFGN |
| | | IVDEVAYHEKYPTIYHLRKKLVDSTDKADL |
| | | RLIYLALAHMIKFRGHFLIEGDLNPDNSDV |
| | | DKLFIQLVQTYNQLFEENPINASGVDAKAI |
| | | LSARLSKSRRLENLIAQLPGEKKNGLFGNL |
| | | IALSLGLTPNFKSNFDLAEDAKLQLSKDTY |
| | | DDDLDNLLAQIGDQYADLFLAAKNLSDAIL |
| | | LSDILRVNTEITKAPLSASMIKRYDEHHQD |
| | | LTLLKALVRQQLPEKYKEIFFDQSKNGYAG |
| | | YIDGGASQEEFYKFIKPILEKMDGTEELLV |
| | | KLNREDLLRKQRTFDNGSIPHQIHLGELHA |
| | | ILRRQEDFYPFLKDNREKIEKILTFRIPYY |
| | | VGPLARGNSRFAWMTRKSEETITPWNFEEV |
| | | VDKGASAQSFIERMTNFDKNLPNEKVLPKH |
| | | SLLYEYFTVYNELTKVKYVTEGMRKPAFLS |
| | | GEQKKAIVDLLFKTNRKVTVKQLKEDYFKK |
| | | IECFDSVEISGVEDRFNASLGTYHDLLKII |
| | | KDKDFLDNEENEDILEDIVLTLTLFEDREM |
| | | IEERLKTYAHLFDDKVMKQLKRRRYTGWGR |
| | | LSRKLINGIRDKQSGKTILDFLKSDGFANR |
| | | NFMQLIHDDSLTFKEDIQKAQVSGQGDSLH |
| | | EHIANLAGSPAIKKGILQTVKVVDELVKVM |
| | | GRHKPENIVIEMARENQTTQKGQKNSRERM |
| | | KRIEEGIKELGSQILKEHPVENTQLQNEKL |
| | | YLYYLQNGRDMYVDQELDINRLSDYDVDHI |
| | | VPQSFLKDDSIDNKVLTRSDKNRGKSDNVP |
| | | SEEVVKKMKNYWRQLLNAKLITQRKFDNLT |
| | | KAERGGLSELDKAGFIKRQLVETRQITKHV |
| | | AQILDSRMNTKYDENDKLIREVKVITLKSK |
| | | LVSDFRKDFQFYKVREINNYHHAHDAYLNA |
| | | VVGTALIKKYPKLGSSGSETPGTSESATPE |
| | | SSGSEVEFSHEYWMRHALTLAKRARDEREV |
| | | PVGAVLVLNNRVIGEGWNRAIGLHDPTAHA |
| | | EIMALRQGGLVMQNYRLIDATLYVTFEPCV |
| | | MCAGAMIHSRIGRVVFGVRNAKTGAAGSLM |
| | | DVLHYPGMNHRVEITEGILADECAALLCYF |
| | | FRMPRQESEFVYGDYKVYDVRKMIAKSEQE |
| | | IGKATAKYFFYSNIMNFFKTEITLANGEIR |
| | | KRPLIETNGETGEIVWDKGRDFATVRKVLS |
| | | MPQVNIVKKTEVQTGGFSKESILPKRNSDK |
| | | LIARKKDWDPKKYGGFDSPTVAYSVLWAKV |
| | | EKGKSKKLKSVKELLGITIMERSSFEKNPI |
| | | DFLEAKGYKEVKKDLIIKLPKYSLFELENG |
| | | RKRMLASAGELQKGNELALPSKYVNFLYLA |
| | | SHYEKLKGSPEDNEQKQLFVEQHKHYLDEI |
| | | IEQISEFSKRVILADANLDKVLSAYNKHRD |
| | | KPIREQAENIIHLFTLTNLGAPAAFKYFDT |
| | | TIDRKRYTSTKEVLDATLIHQSITGLYETR |
| | | IDLSQLGGD |
| 115.3 Cas9 | 1340 | MDKKYSIGLAIGTNSVGWAVITDEYKVPSK |
| TadAins1006 | | KFKVLGNTDRHSIKKNLIGALLFDSGETAE |
| polypeptide | | ATRLKRTARRRYTRRKNRICYLQEIFSNEM |
| sequence | | AKVDDSFFHRLEESFLVEEDKKHERHPIFG |
| | | NIVDEVAYHEKYPTIYHLRKKLVDSTDKAD |
| | | LRLIYLALAHMIKFRGHFLIEGDLNPDNSD |
| | | VDKLFIQLVQTYNQLFEENPINASGVDAKA |
| | | ILSARLSKSRRLENLIAQLPGEKKNGLFGN |
| | | LIALSLGLTPNFKSNFDLAEDAKLQLSKDT |
| | | YDDDLDNLLAQIGDQYADLFLAAKNLSDAI |
| | | LLSDILRVNTEITKAPLSASMIKRYDEHHQ |
| | | DLTLLKALVRQQLPEKYKEIFFDQSKNGYA |
| | | GYIDGGASQEEFYKFIKPILEKMDGTEELL |
| | | VKLNREDLLRKQRTFDNGSIPHQIHLGELH |
| | | AILRRQEDFYPFLKDNREKIEKILTFRIPY |
| | | YVGPLARGNSRFAWMTRKSEETITPWNFEE |
| | | VVDKGASAQSFIERMTNFDKNLPNEKVLPK |
| | | HSLLYEYFTVYNELTKVKYVTEGMRKPAFL |
| | | SGEQKKAIVDLLFKTNRKVTVKQLKEDYFK |
| | | KIECFDSVEISGVEDRFNASLGTYHDLLKI |
| | | IKDKDFLDNEENEDILEDIVLTLTLFEDRE |
| | | MIEERLKTYAHLFDDKVMKQLKRRRYTGWG |
| | | RLSRKLINGIRDKQSGKTILDFLKSDGFAN |
| | | RNFMQLIHDDSLTFKEDIQKAQVSGQGDSL |
| | | HEHIANLAGSPAIKKGILQTVKVVDELVKV |
| | | MGRHKPENIVIEMARENQTTQKGQKNSRER |
| | | MKRIEEGIKELGSQILKEHPVENTQLQNEK |
| | | LYLYYLQNGRDMYVDQELDINRLSDYDVDH |
| | | IVPQSFLKDDSIDNKVLTRSDKNRGKSDNV |
| | | PSEEVVKKMKNYWRQLLNAKLITQRKFDNL |
| | | TKAERGGLSELDKAGFIKRQLVETRQITKH |
| | | VAQILDSRMNTKYDENDKLIREVKVITLKS |
| | | KLVSDFRKDFQFYKVREINNYHHAHDAYLN |
| | | AVVGTALIKKYPKLEGSSGSETPGTSESAT |
| | | PESSGSEVEFSHEYWMRHALTLAKRARDER |
| | | EVPVGAVLVLNNRVIGEGWNRAIGLHDPTA |
| | | HAEIMALRQGGLVMQNYRLIDATLYVTFEP |
| | | CVMCAGAMIHSRIGRVVFGVRNAKTGAAGS |
| | | LMDVLHYPGMNHRVEITEGILADECAALLC |
| | | YFFRMPRQSEFVYGDYKVYDVRKMIAKSEQ |
| | | EIGKATAKYFFYSNIMNFFKTEITLANGEI |
| | | RKRPLIETNGETGEIVWDKGRDFATVRKVL |
| | | SMPQVNIVKKTEVQTGGFSKESILPKRNSD |
| | | KLIARKKDWDPKKYGGFDSPTVAYSVLWAK |
| | | VEKGKSKKLKSVKELLGITIMERSSFEKNP |
| | | IDFLEAKGYKEVKKDLIIKLPKYSLFELEN |
| | | GRKRMLASAGELQKGNELALPSKYVNFLYL |
| | | ASHYEKLKGSPEDNEQKQLFVEQHKHYLDE |
| | | IIEQISEFSKRVILADANLDKVLSAYNKHR |
| | | DKPIREQAENIIHLFTLTNLGAPAAFKYFD |
| | | TTIDRKRYTSTKEVLDATLIHQSITGLYET |
| | | RIDLSQLGGD |
| 115.4 Cas9 | 1341 | MDKKYSIGLAIGTNSVGWAVITDEYKVPSK |
| TadAins1007 | | KFKVLGNTDRHSIKKNLIGALLFDSGETAE |
| polypeptide | | ATRLKRTARRRYTRRKNRICYLQEIFSNEM |
| sequence | | AKVDDSFFHRLEESFLVEEDKKHERHPIFG |
| | | NIVDEVAYHEKYPTIYHLRKKLVDSTDKAD |
| | | LRLIYLALAHMIKFRGHFLIEGDLNPDNSD |
| | | VDKLFIQLVQTYNQLFEENPINASGVDAKA |
| | | ILSARLSKSRRLENLIAQLPGEKKNGLFGN |
| | | LIALSLGLTPNFKSNFDLAEDAKLQLSKDT |
| | | YDDDLDNLLAQIGDQYADLFLAAKNLSDAI |
| | | LLSDILRVNTEITKAPLSASMIKRYDEHHQ |
| | | DLTLLKALVRQQLPEKYKEIFFDQSKNGYA |
| | | GYIDGGASQEEFYKFIKPILEKMDGTEELL |
| | | VKLNREDLLRKQRTFDNGSIPHQIHLGELH |
| | | AILRRQEDFYPFLKDNREKIEKILTFRIPY |
| | | YVGPLARGNSRFAWMTRKSEETITPWNFEE |
| | | VVDKGASAQSFIERMTNFDKNLPNEKVLPK |
| | | HSLLYEYFTVYNELTKVKYVTEGMRKPAFL |
| | | SGEQKKAIVDLLFKTNRKVTVKQLKEDYFK |
| | | KIECFDSVEISGVEDRFNASLGTYHDLLKI |
| | | IKDKDFLDNEENEDILEDIVLTLTLFEDRE |
| | | MIEERLKTYAHLFDDKVMKQLKRRRYTGWG |
| | | RLSRKLINGIRDKQSGKTILDFLKSDGFAN |
| | | RNFMQLIHDDSLTFKEDIQKAQVSGQGDSL |
| | | HEHIANLAGSPAIKKGILQTVKVVDELVKV |
| | | MGRHKPENIVIEMARENQTTQKGQKNSRER |
| | | MKRIEEGIKELGSQILKEHPVENTQLQNEK |
| | | LYLYYLQNGRDMYVDQELDINRLSDYDVDH |
| | | IVPQSFLKDDSIDNKVLTRSDKNRGKSDNV |
| | | PSEEVVKKMKNYWRQLLNAKLITQRKFDNL |
| | | TKAERGGLSELDKAGFIKRQLVETRQITKH |
| | | VAQILDSRMNTKYDENDKLIREVKVITLKS |
| | | KLVSDFRKDFQFYKVREINNYHHAHDAYLN |
| | | AVVGTALIKKYPKLESGSSGSETPGTSESA |
| | | TPESSGSEVEFSHEYWMRHALTLAKRARDE |
| | | REVPVGAVLVLNNRVIGEGWNRAIGLHDP |
| | | TAHAEIMALRQGGLVMQNYRLIDATLYVTF |
| | | EPCVMCAGAMIHSRIGRVVFGVRNAKTGAA |
| | | GSLMDVLHYPGMNHRVEITEGILADECAAL |
| | | LCYFFRMPRQEFVYGDYKVYDVRKMIAKSE |
| | | QEIGKATAKYFFYSNIMNFFKTEITLANGE |
| | | IRKRPLIETNGETGEIVWDKGRDFATVRKV |
| | | LSMPQVNIVKKTEVQTGGFSKESILPKRNS |
| | | DKLIARKKDWDPKKYGGFDSPTVAYSVLVV |
| | | AKVEKGKSKKLKSVKELLGITIMERSSFEK |
| | | NPIDFLEAKGYKEVKKDLIIKLPKYSLFEL |
| | | ENGRKRMLASAGELQKGNELALPSKYVNFL |
| | | YLASHYEKLKGSPEDNEQKQLFVEQHKHYL |
| | | DEIIEQISEFSKRVILADANLDKVLSAYNK |
| | | HRDKPIREQAENIIHLFTLTNLGAPAAFKY |
| | | FDTTIDRKRYTSTKEVLDATLIHQSITGLY |
| | | ETRIDLSQLGGD |
| 116.1 Cas9 | 1342 | MDKKYSIGLAIGTNSVGWAVITDEYKVPSK |
| TadAins | | KFKVLGNTDRHSIKKNLIGALLFDSGETAE |
| C-term | | ATRLKRTARRRYTRRKNRICYLQEIFSNEM |
| truncate2 | | AKVDDSFFHRLEESFLVEEDKKHERHPIFG |
| 792 | | NIVDEVAYHEKYPTIYHLRKKLVDSTDKAD |
| polypeptide | | LRLIYLALAHMIKFRGHFLIEGDLNPDNSD |
| sequence | | VDKLFIQLVQTYNQLFEENPINASGVDAKA |
| | | ILSARLSKSRRLENLIAQLPGEKKNGLFGN |
| | | LIALSLGLTPNFKSNFDLAEDAKLQLSKDT |
| | | YDDDLDNLLAQIGDQYADLFLAAKNLSDAI |
| | | LLSDILRVNTEITKAPLSASMIKRYDEHHQ |
| | | DLTLLKALVRQQLPEKYKEIFFDQSKNGYA |
| | | GYIDGGASQEEFYKFIKPILEKMDGTEELL |
| | | VKLNREDLLRKQRTFDNGSIPHQIHLGELH |
| | | AILRRQEDFYPFLKDNREKIEKILTFRIPY |
| | | YVGPLARGNSRFAWMTRKSEETITPWNFEE |
| | | VVDKGASAQSFIERMTNFDKNLPNEKVLPK |
| | | HSLLYEYFTVYNELTKVKYVTEGMRKPAFL |
| | | SGEQKKAIVDLLFKTNRKVTVKQLKEDYFK |
| | | KIECFDSVEISGVEDRFNASLGTYHDLLKI |
| | | IKDKDFLDNEENEDILEDIVLTLTLFEDRE |
| | | MIEERLKTYAHLFDDKVMKQLKRRRYTGWG |
| | | RLSRKLINGIRDKQSGKTILDFLKSDGFAN |
| | | RNFMQLIHDDSLTFKEDIQKAQVSGQGDSL |
| | | HEHIANLAGSPAIKKGILQTVKVVDELVKV |
| | | MGRHKPENIVIEMARENQTTQKGQKNSRER |
| | | MKRIEEGIKELGGSSGSETPGTSESATPES |
| | | SGSEVEFSHEYWMRHALTLAKRARDEREVP |
| | | VGAVLVLNNRVIGEGWNRAIGLHDPTAHAE |
| | | IMALRQGGLVMQNYRLIDATLYVTFEPCVM |
| | | CAGAMIHSRIGRVVFGVRNAKTGAAGSLMD |
| | | VLHYPGMNHRVEITEGILADECAALLCYFF |
| | | RMPRQSQILKEHPVENTQLQNEKLYLYYLQ |
| | | NGRDMYVDQELDINRLSDYDVDHIVPQSFL |
| | | KDDSIDNKVLTRSDKNRGKSDNVPSEEWKK |
| | | MKNYWRQLLNAKLITQRKFDNLTKAERGGL |
| | | SELDKAGFIKRQLVETRQITKHVAQILDSR |
| | | MNTKYDENDKLIREVKVITLKSKLVSDFRK |
| | | DFQFYKVREINNYHHAHDAYLNAVVGTALI |
| | | KKYPKLESEFVYGDYKVYDVRKMIAKSEQE |
| | | IGKATAKYFFYSNIMNFFKTEITLANGEIR |
| | | KRPLIETNGETGEIVWDKGRDFATVRKVLS |
| | | MPQVNIVKKTEVQTGGFSKESILPKRNSDK |
| | | LIARKKDWDPKKYGGFDSPTVAYSVLVVAK |
| | | VEKGKSKKLKSVKELLGITIMERSSFEKNP |
| | | IDFLEAKGYKEVKKDLIIKLPKYSLFELEN |
| | | GRKRMLASAGELQKGNELALPSKYVNFLYL |
| | | ASHYEKLKGSPEDNEQKQLFVEQHKHYLDE |
| | | IIEQISEFSKRVILADANLDKVLSAYNKHR |
| | | DKPIREQAENIIHLFTLTNLGAPAAFKYFD |
| | | TTIDRKRYTSTKEVLDATLIHQSITGLYET |
| | | RIDLSQLGGD |
| 116.2 Cas9 | 1343 | MDKKYSIGLAIGTNSVGWAVITDEYKVPSK |
| TadAins | | KFKVLGNTDRHSIKKNLIGALLFDSGETAE |
| C-term | | ATRLKRTARRRYTRRKNRICYLQEIFSNEM |
| truncate2 | | AKVDDSFFHRLEESFLVEEDKKHERHPIFG |
| 791 | | NIVDEVAYHEKYPTIYHLRKKLVDSTDKAD |
| polypeptide | | LRLIYLALAHMIKFRGHFLIEGDLNPDNSD |
| sequence | | VDKLFIQLVQTYNQLFEENPINASGVDAKA |
| | | ILSARLSKSRRLENLIAQLPGEKKNGLFGN |
| | | LIALSLGLTPNFKSNFDLAEDAKLQLSKDT |
| | | YDDDLDNLLAQIGDQYADLFLAAKNLSDAI |
| | | LLSDILRVNTEITKAPLSASMIKRYDEHHQ |
| | | DLTLLKALVRQQLPEKYKEIFFDQSKNGYA |
| | | GYIDGGASQEEFYKFIKPILEKMDGTEELL |
| | | VKLNREDLLRKQRTFDNGSIPHQIHLGELH |
| | | AILRRQEDFYPFLKDNREKIEKILTFRIPY |
| | | YVGPLARGNSRFAWMTRKSEETITPWNFEE |
| | | VVDKGASAQSFIERMTNFDKNLPNEKVLPK |
| | | HSLLYEYFTVYNELTKVKYVTEGMRKPAFL |
| | | SGEQKKAIVDLLFKTNRKVTVKQLKEDYFK |
| | | KIECFDSVEISGVEDRFNASLGTYHDLLKI |
| | | IKDKDFLDNEENEDILEDIVLTLTLFEDRE |
| | | MIEERLKTYAHLFDDKVMKQLKRRRYTGWG |
| | | RLSRKLINGIRDKQSGKTILDFLKSDGFAN |
| | | RNFMQLIHDDSLTFKEDIQKAQVSGQGDSL |
| | | HEHIANLAGSPAIKKGILQTVKVVDELVKV |
| | | MGRHKPENIVIEMARENQTTQKGQKNSRER |
| | | MKRIEEGIKELGSSGSETPGTSESATPESS |
| | | GSEVEFSHEYWMRHALTLAKRARDEREVPV |
| | | GAVLVLNNRVIGEGWNRAIGLHDPTAHAEI |
| | | MALRQGGLVMQNYRLIDATLYVTFEPCVMC |
| | | AGAMIHSRIGRWFGVRNAKTGAAGSLMDVL |
| | | HYPGMNHRVEITEGILADECAALLCYFFRM |
| | | PRQGSQILKEHPVENTQLQNEKLYLYYLQN |
| | | GRDMYVDQELDINRLSDYDVDHIVPQSFLK |
| | | DDSIDNKVLTRSDKNRGKSDNVPSEEWKKM |
| | | KNYWRQLLNAKLITQRKFDNLTKAERGGLS |
| | | ELDKAGFIKRQLVETRQITKHVAQILDSRM |
| | | NTKYDENDKLIREVKVITLKSKLVSDFRKD |
| | | FQFYKVREINNYHHAHDAYLNAVVGTALIK |
| | | KYPKLESEFVYGDYKVYDVRKMIAKSEQEI |
| | | GKATAKYFFYSNIMNFFKTEITLANGEIRK |
| | | RPLIETNGETGEIVWDKGRDFATVRKVLSM |
| | | PQVNIVKKTEVQTGGFSKESILPKRNSDKL |
| | | IARKKDWDPKKYGGFDSPTVAYSVLVVAKV |
| | | EKGKSKKLKSVKELLGITIMERSSFEKNPI |
| | | DFLEAKGYKEVKKDLIIKLPKYSLFELENG |
| | | RKRMLASAGELQKGNELALPSKYVNFLYLA |
| | | SHYEKLKGSPEDNEQKQLFVEQHKHYLDEI |
| | | IEQISEFSKRVILADANLDKVLSAYNKHRD |
| | | KPIREQAENIIHLFTLTNLGAPAAFKYFDT |
| | | TIDRKRYTSTKEVLDATLIHQSITGLYETR |
| | | IDLSQLGGD |
| 116.3 Cas9 | 1344 | MDKKYSIGLAIGTNSVGWAVITDEYKVPSK |
| TadAins | | KFKVLGNTDRHSIKKNLIGALLFDSGETAE |
| C-term | | ATRLKRTARRRYTRRKNRICYLQEIFSNEM |
| truncate2 | | AKVDDSFFHRLEESFLVEEDKKHERHPIFG |
| 790 | | NIVDEVAYHEKYPTIYHLRKKLVDSTDKAD |
| polypeptide | | LRLIYLALAHMIKFRGHFLIEGDLNPDNSD |
| sequence | | VDKLFIQLVQTYNQLFEENPINASGVDAKA |
| | | ILSARLSKSRRLENLIAQLPGEKKNGLFGN |
| | | LIALSLGLTPNFKSNFDLAEDAKLQLSKDT |
| | | YDDDLDNLLAQIGDQYADLFLAAKNLSDAI |
| | | LLSDILRVNTEITKAPLSASMIKRYDEHHQ |
| | | DLTLLKALVRQQLPEKYKEIFFDQSKNGYA |
| | | GYIDGGASQEEFYKFIKPILEKMDGTEELL |
| | | VKLNREDLLRKQRTFDNGSIPHQIHLGELH |
| | | AILRRQEDFYPFLKDNREKIEKILTFRIPY |
| | | YVGPLARGNSRFAWMTRKSEETITPWNFEE |
| | | VVDKGASAQSFIERMTNFDKNLPNEKVLPK |
| | | HSLLYEYFTVYNELTKVKYVTEGMRKPAFL |
| | | SGEQKKAIVDLLFKTNRKVTVKQLKEDYFK |
| | | KIECFDSVEISGVEDRFNASLGTYHDLLKI |
| | | IKDKDFLDNEENEDILEDIVLTLTLFEDRE |
| | | MIEERLKTYAHLFDDKVMKQLKRRRYTGWG |
| | | RLSRKLINGIRDKQSGKTILDFLKSDGFAN |
| | | RNFMQLIHDDSLTFKEDIQKAQVSGQGDSL |
| | | HEHIANLAGSPAIKKGILQTVKVVDELVKV |
| | | MGRHKPENIVIEMARENQTTQKGQKNSRER |
| | | MKRIEEGIKEGSSGSETPGTSESATPESSG |
| | | SEVEFSHEYWMRHALTLAKRARDEREVPVG |
| | | AVLVLNNRVIGEGWNRAIGLHDPTAHAEIM |
| | | ALRQGGLVMQNYRLIDATLYVTFEPCVMCA |
| | | GAMIHSRIGRVVFGVRNAKTGAAGSLMDVL |
| | | HYPGMNHRVEITEGILADECAALLCYFFRM |
| | | PRQLGSQILKEHPVENTQLQNEKLYLYYLQ |
| | | NGRDMYVDQELDINRLSDYDVDHIVPQSFL |
| | | KDDSIDNKVLTRSDKNRGKSDNVPSEEWKK |
| | | MKNYWRQLLNAKLITQRKFDNLTKAERGGL |
| | | SELDKAGFIKRQLVETRQITKHVAQILDSR |
| | | MNTKYDENDKLIREVKVITLKSKLVSDFRK |
| | | DFQFYKVREINNYHHAHDAYLNAVVGTALI |
| | | KKYPKLESEFVYGDYKVYDVRKMIAKSEQE |
| | | IGKATAKYFFYSNIMNFFKTEITLANGEIR |
| | | KRPLIETNGETGEIVWDKGRDFATVRKVLS |
| | | MPQVNIVKKTEVQTGGFSKESILPKRNSDK |
| | | LIARKKDWDPKKYGGFDSPTVAYSVLVVAK |
| | | VEKGKSKKLKSVKELLGITIMERSSFEKNP |
| | | IDFLEAKGYKEVKKDLIIKLPKYSLFELEN |
| | | GRKRMLASAGELQKGNELALPSKYVNFLYL |
| | | ASHYEKLKGSPEDNEQKQLFVEQHKHYLDE |
| | | IIEQISEFSKRVILADANLDKVLSAYNKHR |
| | | DKPIREQAENIIHLFTLTNLGAPAAFKYFD |
| | | TTIDRKRYTSTKEVLDATLIHQSITGLYET |
| | | RIDLSQLGGD |
| 117 Cas9 | 1345 | MDKKYSIGLAIGTNSVGWAVITDEYKVPSK |
| delta | | KFKVLGNTDRHSIKKNLIGALLFDSGETAE |
| 1017-1069 | | ATRLKRTARRRYTRRKNRICYLQEIFSNEM |
| polypeptide | | AKVDDSFFHRLEESFLVEEDKKHERHPIFG |
| sequence | | NIVDEVAYHEKYPTIYHLRKKLVDSTDKAD |
| | | LRLIYLALAHMIKFRGHFLIEGDLNPDNSD |
| | | VDKLFIQLVQTYNQLFEENPINASGVDAKA |
| | | ILSARLSKSRRLENLIAQLPGEKKNGLFGN |
| | | LIALSLGLTPNFKSNFDLAEDAKLQLSKDT |
| | | YDDDLDNLLAQIGDQYADLFLAAKNLSDAI |
| | | LLSDILRVNTEITKAPLSASMIKRYDEHHQ |
| | | DLTLLKALVRQQLPEKYKEIFFDQSKNGYA |
| | | GYIDGGASQEEFYKFIKPILEKMDGTEELL |
| | | VKLNREDLLRKQRTFDNGSIPHQIHLGELH |
| | | AILRRQEDFYPFLKDNREKIEKILTFRIPY |
| | | YVGPLARGNSRFAWMTRKSEETITPWNFEE |
| | | VVDKGASAQSFIERMTNFDKNLPNEKVLPK |
| | | HSLLYEYFTVYNELTKVKYVTEGMRKPAFL |
| | | SGEQKKAIVDLLFKTNRKVTVKQLKEDYFK |
| | | KIECFDSVEISGVEDRFNASLGTYHDLLKI |
| | | IKDKDFLDNEENEDILEDIVLTLTLFEDRE |
| | | MIEERLKTYAHLFDDKVMKQLKRRRYTGWG |
| | | RLSRKLINGIRDKQSGKTILDFLKSDGFAN |
| | | RNFMQLIHDDSLTFKEDIQKAQVSGQGDSL |
| | | HEHIANLAGSPAIKKGILQTVKVVDELVKV |
| | | MGRHKPENIVIEMARENQTTQKGQKNSRER |
| | | MKRIEEGIKELGSQILKEHPVENTQLQNEK |
| | | LYLYYLQNGRDMYVDQELDINRLSDYDVDH |
| | | IVPQSFLKDDSIDNKVLTRSDKNRGKSDNV |
| | | PSEEVVKKMKNYWRQLLNAKLITQRKFDNL |
| | | TKAERGGLSELDKAGFIKRQLVETRQITKH |
| | | VAQILDSRMNTKYDENDKLIREVKVITLKS |
| | | KLVSDFRKDFQFYKVREINNYHHAHDAYLN |
| | | AVVGTALIKKYPKLESEFVYGDYKVYSSGS |
| | | EVEFSHEYWMRHALTLAKRARDEREVPVGA |
| | | VLVLNNRVIGEGWNRAIGLHDPTAHAEIMA |
| | | LRQGGLVMQNYRLIDATLYVTFEPCVMCAG |
| | | AMIHSRIGRVVFGVRNAKTGAAGSLMDVLH |
| | | YPGMNHRVEITEGILADECAALLCYFFRMP |
| | | RQVFNAQKKAQSSTDGEIVWDKGRDFATVR |
| | | KVLSMPQVNIVKKTEVQTGGFSKESILPKR |
| | | NSDKLIARKKDWDPKKYGGFDSPTVAYSVL |
| | | WAKVEKGKSKKLKSVKELLGITIMERSSFE |
| | | KNPIDFLEAKGYKEVKKDLIIKLPKYSLFE |
| | | LENGRKRMLASAGELQKGNELALPSKYVNF |
| | | LYLASHYEKLKGSPEDNEQKQLFVEQHKHY |
| | | LDEIIEQISEFSKRVILADANLDKVLSAYN |
| | | KHRDKPIREQAENIIHLFTLTNLGAPAAFK |
| | | YFDTTIDRKRYTSTKEVLDATLIHQSITGL |
| | | YETRIDLSQLGGD |
| 118 Cas9 | 1346 | MDKKYSIGLAIGTNSVGWAVITDEYKVPSK |
| TadA- | | KFKVLGNTDRHSIKKNLIGALLFDSGETAE |
| CP116ins | | ATRLKRTARRRYTRRKNRICYLQEIFSNEM |
| 1067 | | AKVDDSFFHRLEESFLVEEDKKHERHPIFG |
| polypeptide | | NIVDEVAYHEKYPTIYHLRKKLVDSTDKAD |
| sequence | | LRLIYLALAHMIKFRGHFLIEGDLNPDNSD |
| | | VDKLFIQLVQTYNQLFEENPINASGVDAKA |
| | | ILSARLSKSRRLENLIAQLPGEKKNGLFGN |
| | | LIALSLGLTPNFKSNFDLAEDAKLQLSKDT |
| | | YDDDLDNLLAQIGDQYADLFLAAKNLSDAI |
| | | LLSDILRVNTEITKAPLSASMIKRYDEHHQ |
| | | DLTLLKALVRQQLPEKYKEIFFDQSKNGYA |
| | | GYIDGGASQEEFYKFIKPILEKMDGTEELL |
| | | VKLNREDLLRKQRTFDNGSIPHQIHLGELH |
| | | AILRRQEDFYPFLKDNREKIEKILTFRIPY |
| | | YVGPLARGNSRFAWMTRKSEETITPWNFEE |
| | | VVDKGASAQSFIERMTNFDKNLPNEKVLPK |
| | | HSLLYEYFTVYNELTKVKYVTEGMRKPAFL |
| | | SGEQKKAIVDLLFKTNRKVTVKQLKEDYFK |
| | | KIECFDSVEISGVEDRFNASLGTYHDLLKI |
| | | IKDKDFLDNEENEDILEDIVLTLTLFEDRE |
| | | MIEERLKTYAHLFDDKVMKQLKRRRYTGWG |
| | | RLSRKLINGIRDKQSGKTILDFLKSDGFAN |
| | | RNFMQLIHDDSLTFKEDIQKAQVSGQGDSL |
| | | HEHIANLAGSPAIKKGILQTVKVVDELVKV |
| | | MGRHKPENIVIEMARENQTTQKGQKNSRER |
| | | MKRIEEGIKELGSQILKEHPVENTQLQNEK |
| | | LYLYYLQNGRDMYVDQELDINRLSDYDVDH |
| | | IVPQSFLKDDSIDNKVLTRSDKNRGKSDNV |
| | | PSEEVVKKMKNYWRQLLNAKLITQRKFDNL |
| | | TKAERGGLSELDKAGFIKRQLVETRQITKH |
| | | VAQILDSRMNTKYDENDKLIREVKVITLKS |
| | | KLVSDFRKDFQFYKVREINNYHHAHDAYLN |
| | | AVVGTALIKKYPKLESEFVYGDYKVYDVRK |
| | | MIAKSEQEIGKATAKYFFYSNIMNFFKTEI |
| | | TLANGEIRKRPLIETNMNHRVEITEGILAD |
| | | ECAALLCYFFRMPRQVFNAQKKAQSSTDGS |
| | | SGSETPGTSESATPESSGSEVEFSHEYWMR |
| | | HALTLAKRARDEREVPVGAVLVLNNRVIGE |
| | | GWNRAIGLHDPTAHAEIMALRQGGLVMQNY |
| | | RLIDATLYVTFEPCVMCAGAMIHSRIGRVV |
| | | FGVRNAKTGAAGSLMDVLHYPGGETGEIVW |
| | | DKGRDFATVRKVLSMPQVNIVKKTEVQTGG |
| | | FSKESILPKRNSDKLIARKKDWDPKKYGGF |
| | | DSPTVAYSVLVVAKVEKGKSKKLKSVKELL |
| | | GITIMERSSFEKNPIDFLEAKGYKEVKKDL |
| | | IIKLPKYSLFELENGRKRMLASAGELQKGN |
| | | ELALPSKYVNFLYLASHYEKLKGSPEDNEQ |
| | | KQLFVEQHKHYLDEIIEQISEFSKRVILAD |
| | | ANLDKVLSAYNKHRDKPIREQAENIIHLFT |
| | | LTNLGAPAAFKYFDTTIDRKRYTSTKEVLD |
| | | ATLIHQSITGLYETRIDLSQLGGD |
| 119 Cas9 | 1347 | MDKKYSIGLAIGTNSVGWAVITDEYKVPSK |
| TadAins | | KFKVLGNTDRHSIKKNLIGALLFDSGETAE |
| 701 | | ATRLKRTARRRYTRRKNRICYLQEIFSNEM |
| polypeptide | | AKVDDSFFHRLEESFLVEEDKKHERHPIFG |
| sequence | | NIVDEVAYHEKYPTIYHLRKKLVDSTDKAD |
| | | LRLIYLALAHMIKFRGHFLIEGDLNPDNSD |
| | | VDKLFIQLVQTYNQLFEENPINASGVDAKA |
| | | ILSARLSKSRRLENLIAQLPGEKKNGLFGN |
| | | LIALSLGLTPNFKSNFDLAEDAKLQLSKDT |
| | | YDDDLDNLLAQIGDQYADLFLAAKNLSDAI |
| | | LLSDILRVNTEITKAPLSASMIKRYDEHHQ |
| | | DLTLLKALVRQQLPEKYKEIFFDQSKNGYA |
| | | GYIDGGASQEEFYKFIKPILEKMDGTEELL |
| | | VKLNREDLLRKQRTFDNGSIPHQIHLGELH |
| | | AILRRQEDFYPFLKDNREKIEKILTFRIPY |
| | | YVGPLARGNSRFAWMTRKSEETITPWNFEE |
| | | VVDKGASAQSFIERMTNFDKNLPNEKVLPK |
| | | HSLLYEYFTVYNELTKVKYVTEGMRKPAFL |
| | | SGEQKKAIVDLLFKTNRKVTVKQLKEDYFK |
| | | KIECFDSVEISGVEDRFNASLGTYHDLLKI |
| | | IKDKDFLDNEENEDILEDIVLTLTLFEDRE |
| | | MIEERLKTYAHLFDDKVMKQLKRRRYTGWG |
| | | RLSRKLINGIRDKQSGKTILDFLKSDGFAN |
| | | RNFMQLIHDDSGSSGSETPGTSESATPESS |
| | | GSEVEFSHEYWMRHALTLAKRARDEREVPV |
| | | GAVLVLNNRVIGEGWNRAIGLHDPTAHAEI |
| | | MALRQGGLVMQNYRLIDATLYVTFEPCVMC |
| | | AGAMIHSRIGRVVFGVRNAKTGAAGSLMDV |
| | | LHYPGMNHRVEITEGILADECAALLCYFFR |
| | | MPRQVFNAQKKAQSSTDLTFKEDIQKAQVS |
| | | GQGDSLHEHIANLAGSPAIKKGILQTVKVV |
| | | DELVKVMGRHKPENIVIEMARENQTTQKGQ |
| | | KNSRERMKRIEEGIKELGSQILKEHPVENT |
| | | QLQNEKLYLYYLQNGRDMYVDQELDINRLS |
| | | DYDVDHIVPQSFLKDDSIDNKVLTRSDKNR |
| | | GKSDNVPSEEWKKMKNYWRQLLNAKLITQR |
| | | KFDNLTKAERGGLSELDKAGFIKRQLVETR |
| | | QITKHVAQILDSRMNTKYDENDKLIREVKV |
| | | ITLKSKLVSDFRKDFQFYKVREINNYHHAH |
| | | DAYLNAVVGTALIKKYPKLESEFVYGDYKV |
| | | YDVRKMIAKSEQEIGKATAKYFFYSNIMNF |
| | | FKTEITLANGEIRKRPLIETNGETGEIVWD |
| | | KGRDFATVRKVLSMPQVNIVKKTEVQTGGF |
| | | SKESILPKRNSDKLIARKKDWDPKKYGGFD |
| | | SPTVAYSVLVVAKVEKGKSKKLKSVKELLG |
| | | ITIMERSSFEKNPIDFLEAKGYKEVKKDLI |
| | | IKLPKYSLFELENGRKRMLASAGELQKGNE |
| | | LALPSKYVNFLYLASHYEKLKGSPEDNEQK |
| | | QLFVEQHKHYLDEIIEQISEFSKRVILADA |
| | | NLDKVLSAYNKHRDKPIREQAENIIHLFTL |
| | | TNLGAPAAFKYFDTTIDRKRYTSTKEVLDA |
| | | TLIHQSITGLYETRIDLSQLGGD |
| 120 Cas9 | 1348 | MDKKYSIGLAIGTNSVGWAVITDEYKVPSK |
| TadACP136 | | KFKVLGNTDRHSIKKNLIGALLFDSGETAE |
| ins | | ATRLKRTARRRYTRRKNRICYLQEIFSNEM |
| 1248 | | AKVDDSFFHRLEESFLVEEDKKHERHPIFG |
| polypeptide | | NIVDEVAYHEKYPTIYHLRKKLVDSTDKAD |
| sequence | | LRLIYLALAHMIKFRGHFLIEGDLNPDNSD |
| | | VDKLFIQLVQTYNQLFEENPINASGVDAKA |
| | | ILSARLSKSRRLENLIAQLPGEKKNGLFGN |
| | | LIALSLGLTPNFKSNFDLAEDAKLQLSKDT |
| | | YDDDLDNLLAQIGDQYADLFLAAKNLSDAI |
| | | LLSDILRVNTEITKAPLSASMIKRYDEHHQ |
| | | DLTLLKALVRQQLPEKYKEIFFDQSKNGYA |
| | | GYIDGGASQEEFYKFIKPILEKMDGTEELL |
| | | VKLNREDLLRKQRTFDNGSIPHQIHLGELH |
| | | AILRRQEDFYPFLKDNREKIEKILTFRIPY |
| | | YVGPLARGNSRFAWMTRKSEETITPWNFEE |
| | | VVDKGASAQSFIERMTNFDKNLPNEKVLPK |
| | | HSLLYEYFTVYNELTKVKYVTEGMRKPAFL |
| | | SGEQKKAIVDLLFKTNRKVTVKQLKEDYFK |
| | | KIECFDSVEISGVEDRFNASLGTYHDLLKI |
| | | IKDKDFLDNEENEDILEDIVLTLTLFEDRE |
| | | MIEERLKTYAHLFDDKVMKQLKRRRYTGWG |
| | | RLSRKLINGIRDKQSGKTILDFLKSDGFAN |
| | | RNFMQLIHDDSLTFKEDIQKAQVSGQGDSL |
| | | HEHIANLAGSPAIKKGILQTVKWDELVKVM |
| | | GRHKPENIVIEMARENQTTQKGQKNSRERM |
| | | KRIEEGIKELGSQILKEHPVENTQLQNEKL |
| | | YLYYLQNGRDMYVDQELDINRLSDYDVDHI |
| | | VPQSFLKDDSIDNKVLTRSDKNRGKSDNVP |
| | | SEEVVKKMKNYWRQLLNAKLITQRKFDNLT |
| | | KAERGGLSELDKAGFIKRQLVETRQITKHV |
| | | AQILDSRMNTKYDENDKLIREVKVITLKSK |
| | | LVSDFRKDFQFYKVREINNYHHAHDAYLNA |
| | | VVGTALIKKYPKLESEFVYGDYKVYDVRKM |
| | | IAKSEQEIGKATAKYFFYSNIMNFFKTEIT |
| | | LANGEIRKRPLIETNGETGEIVWDKGRDFA |
| | | TVRKVLSMPQVNIVKKTEVQTGGFSKESIL |
| | | PKRNSDKLIARKKDWDPKKYGGFDSPTVAY |
| | | SVLVVAKVEKGKSKKLKSVKELLGITIMER |
| | | SSFEK |
| | | NPIDFLEAKGYKEVKKDLIIKLPKYSLFEL |
| | | ENGRKRMLASAGELQKGNELALPSKYVNFL |
| | | YLASHYEKLKGSMNHRVEITEGILADECAA |
| | | LLCYFFRMPRQVFNAQKKAQSSTDGSSGSE |
| | | TPGTSESATPESSGSEVEFSHEYWMRHALT |
| | | LAKRARDEREVPVGAVLVLNNRVIGEGWNR |
| | | AIGLHDPTAHAEIMALRQGGLVMQNYRLID |
| | | ATLYVTFEPCVMCAGAMIHSRIGRWFGVRN |
| | | AKTGAAGSLMDVLHYPGPEDNEQKQLFVEQ |
| | | HKHYLDEIIEQISEFSKRVILADANLDKVL |
| | | SAYNKHRDKPIREQAENIIHLFTLTNLGAP |
| | | AAFKYFDTTIDRKRYTSTKEVLDATLIHQS |
| | | ITGLYETRIDLSQLGGD |
| 121 Cas9 | 1349 | MDKKYSIGLAIGTNSVGWAVITDEYKVPSK |
| TadACP136ins | | KFKVLGNTDRHSIKKNLIGALLFDSGETAE |
| 1052 | | ATRLKRTARRRYTRRKNRICYLQEIFSNEM |
| polypeptide | | AKVDDSFFHRLEESFLVEEDKKHERHPIFG |
| sequence | | NIVDEVAYHEKYPTIYHLRKKLVDSTDKAD |
| | | LRLIYLALAHMIKFRGHFLIEGDLNPDNSD |
| | | VDKLFIQLVQTYNQLFEENPINASGVDAKA |
| | | ILSARLSKSRRLENLIAQLPGEKKNGLFGN |
| | | LIALSLGLTPNFKSNFDLAEDAKLQLSKDT |
| | | YDDDLDNLLAQIGDQYADLFLAAKNLSDAI |
| | | LLSDILRVNTEITKAPLSASMIKRYDEHHQ |
| | | DLTLLKALVRQQLPEKYKEIFFDQSKNGYA |
| | | GYIDGGASQEEFYKFIKPILEKMDGTEELL |
| | | VKLNREDLLRKQRTFDNGSIPHQIHLGELH |
| | | AILRRQEDFYPFLKDNREKIEKILTFRIPY |
| | | YVGPLARGNSRFAWMTRKSEETITPWNFEE |
| | | VVDKGASAQSFIERMTNFDKNLPNEKVLPK |
| | | HSLLYEYFTVYNELTKVKYVTEGMRKPAFL |
| | | SGEQKKAIVDLLFKTNRKVTVKQLKEDYFK |
| | | KIECFDSVEISGVEDRFNASLGTYHDLLKI |
| | | IKDKDFLDNEENEDILEDIVLTLTLFEDRE |
| | | MIEERLKTYAHLFDDKVMKQLKRRRYTGWG |
| | | RLSRKLINGIRDKQSGKTILDFLKSDGFAN |
| | | RNFMQLIHDDSLTFKEDIQKAQVSGQGDSL |
| | | HEHIANLAGSPAIKKGILQTVKVVDELVKV |
| | | MGRHKPENIVIEMARENQTTQKGQKNSRER |
| | | MKRIEEGIKELGSQILKEHPVENTQLQNEK |
| | | LYLYYLQNGRDMYVDQELDINRLSDYDVDH |
| | | IVPQSFLKDDSIDNKVLTRSDKNRGKSDNV |
| | | PSEEVVKKMKNYWRQLLNAKLITQRKFDNL |
| | | TKAERGGLSELDKAGFIKRQLVETRQITKH |
| | | VAQILDSRMNTKYDENDKLIREVKVITLKS |
| | | KLVSDFRKDFQFYKVREINNYHHAHDAYLN |
| | | AVVGTALIKKYPKLESEFVYGDYKVYDVRK |
| | | MIAKSEQEIGKATAKYFFYSNIMNFFKTEI |
| | | TLAMNHRVEITEGILADECAALLCYFFRMP |
| | | RQVFNAQKKAQSSTDGSSGSETPGTSESAT |
| | | PESSGSEVEFSHEYWMRHALTLAKRARDER |
| | | EVPVGAVLVLNNRVIGEGWNRAIGLHDPTA |
| | | HAEIMALRQGGLVMQNYRLIDATLYVTFEP |
| | | CVMCAGAMIHSRIGRWFGVRNAKTGAAGSL |
| | | MDVLHYPGNGEIRKRPLIETNGETGEIVWD |
| | | KGRDFATVRKVLSMPQVNIVKKTEVQTGGF |
| | | SKESILPKRNSDKLIARKKDWDPKKYGGFD |
| | | SPTVAYSVLVVAKVEKGKSKKLKSVKELLG |
| | | ITIMERSSFEKNPIDFLEAKGYKEVKKDLI |
| | | IKLPKYSLFELENGRKRMLASAGELQKGNE |
| | | LALPSKYVNFLYLASHYEKLKGSPEDNEQK |
| | | QLFVEQHKHYLDEIIEQISEFSKRVILADA |
| | | NLDKVLSAYNKHRDKPIREQAENIIHLFTL |
| | | TNLGAPAAFKYFDTTIDRKRYTSTKEVLDA |
| | | TLIHQSITGLYETRIDLSQLGGD |
| 122 Cas9 | 1350 | MDKKYSIGLAIGTNSVGWAVITDEYKVPSK |
| TadACP136 | | KFKVLGNTDRHSIKKNLIGALLFDSGETAE |
| ins | | ATRLKRTARRRYTRRKNRICYLQEIFSNEM |
| 1041 | | AKVDDSFFHRLEESFLVEEDKKHERHPIFG |
| polypeptide | | NIVDEVAYHEKYPTIYHLRKKLVDSTDKAD |
| sequence | | LRLIYLALAHMIKFRGHFLIEGDLNPDNSD |
| | | VDKLFIQLVQTYNQLFEENPINASGVDAKA |
| | | ILSARLSKSRRLENLIAQLPGEKKNGLFGN |
| | | LIALSLGLTPNFKSNFDLAEDAKLQLSKDT |
| | | YDDDLDNLLAQIGDQYADLFLAAKNLSDAI |
| | | LLSDILRVNTEITKAPLSASMIKRYDEHHQ |
| | | DLTLLKALVRQQLPEKYKEIFFDQSKNGYA |
| | | GYIDGGASQEEFYKFIKPILEKMDGTEELL |
| | | VKLNREDLLRKQRTFDNGSIPHQIHLGELH |
| | | AILRRQEDFYPFLKDNREKIEKILTFRIPY |
| | | YVGPLARGNSRFAWMTRKSEETITPWNFEE |
| | | VVDKGASAQSFIERMTNFDKNLPNEKVLPK |
| | | HSLLYEYFTVYNELTKVKYVTEGMRKPAFL |
| | | SGEQKKAIVDLLFKTNRKVTVKQLKEDYFK |
| | | KIECFDSVEISGVEDRFNASLGTYHDLLKI |
| | | IKDKDFLDNEENEDILEDIVLTLTLFEDRE |
| | | MIEERLKTYAHLFDDKVMKQLKRRRYTGWG |
| | | RLSRKLINGIRDKQSGKTILDFLKSDGFAN |
| | | RNFMQLIHDDSLTFKEDIQKAQVSGQGDSL |
| | | HEHIANLAGSPAIKKGILQTVKVVDELVKV |
| | | MGRHK |
| | | PENIVIEMARENQTTQKGQKNSRERMKRIE |
| | | EGIKELGSQILKEHPVENTQLQNEKLYLYY |
| | | LQNGRDMYVDQELDINRLSDYDVDHIVPQS |
| | | FLKDDSIDNKVLTRSDKNRGKSDNVPSEEV |
| | | VKKMKNYWRQLLNAKLITQRKFDNLTKAER |
| | | GGLSELDKAGFIKRQLVETRQITKHVAQIL |
| | | DSRMNTKYDENDKLIREVKVITLKSKLVSD |
| | | FRKDFQFYKVREINNYHHAHDAYLNAVVGT |
| | | ALIKKYPKLESEFVYGDYKVYDVRKMIAKS |
| | | EQEIGKATAKYFFYSMNHRVEITEGILADE |
| | | CAALLCYFFRMPRQVFNAQKKAQSSTDGSS |
| | | GSETPGTSESATPESSGSEVEFSHEYWMRH |
| | | ALTLAKRARDEREVPVGAVLVLNNRVIGEG |
| | | WNRAIGLHDPTAHAEIMALRQGGLVMQNYR |
| | | LIDATLYVTFEPCVMCAGAMIHSRIGRVVF |
| | | GVRNAKTGAAGSLMDVLHYPGNIMNFFKTE |
| | | ITLANGEIRKRPLIETNGETGEIVWDKGRD |
| | | FATVRKVLSMPQVNIVKKTEVQTGGFSKES |
| | | ILPKRNSDKLIARKKDWDPKKYGGFDSPTV |
| | | AYSVLWAKVEKGKSKKLKSVKELLGITIME |
| | | RSSFEKNPIDFLEAKGYKEVKKDLIIKLPK |
| | | YSLFELENGRKRMLASAGELQKGNELALPS |
| | | KYVNFLYLASHYEKLKGSPEDNEQKQLFVE |
| | | QHKHYLDEIIEQISEFSKRVILADANLDKV |
| | | LSAYNKHRDKPIREQAENIIHLFTLTNLGA |
| | | PAAFKYFDTTIDRKRYTSTKEVLDATLIHQ |
| | | SITGLYETRIDLSQLGGD |
| 123 Cas9 | 1351 | MDKKYSIGLAIGTNSVGWAVITDEYKVPSK |
| TadACP139 | | KFKVLGNTDRHSIKKNLIGALLFDSGETAE |
| ins | | ATRLKRTARRRYTRRKNRICYLQEIFSNEM |
| 1299 | | AKVDDSFFHRLEESFLVEEDKKHERHPIFG |
| polypeptide | | NIVDEVAYHEKYPTIYHLRKKLVDSTDKAD |
| sequence | | LRLIYLALAHMIKFRGHFLIEGDLNPDNSD |
| | | VDKLFIQLVQTYNQLFEENPINASGVDAKA |
| | | ILSARLSKSRRLENLIAQLPGEKKNGLFGN |
| | | LIALSLGLTPNFKSNFDLAEDAKLQLSKDT |
| | | YDDDLDNLLAQIGDQYADLFLAAKNLSDAI |
| | | LLSDILRVNTEITKAPLSASMIKRYDEHHQ |
| | | DLTLLKALVRQQLPEKYKEIFFDQSKNGYA |
| | | GYIDGGASQEEFYKFIKPILEKMDGTEELL |
| | | VKLNREDLLRKQRTFDNGSIPHQIHLGELH |
| | | AILRRQEDFYPFLKDNREKIEKILTFRIPY |
| | | YVGPLARGNSRFAWMTRKSEETITPWNFEE |
| | | VVDKGASAQSFIERMTNFDKNLPNEKVLPK |
| | | HSLLYEYFTVYNELTKVKYVTEGMRKPAFL |
| | | SGEQKKAIVDLLFKTNRKVTVKQLKEDYFK |
| | | KIECFDSVEISGVEDRFNASLGTYHDLLKI |
| | | IKDKDFLDNEENEDILEDIVLTLTLFEDRE |
| | | MIEERLKTYAHLFDDKVMKQLKRRRYTGWG |
| | | RLSRKLINGIRDKQSGKTILDFLKSDGFAN |
| | | RNFMQLIHDDSLTFKEDIQKAQVSGQGDSL |
| | | HEHIANLAGSPAIKKGILQTVKVVDELVKV |
| | | MGRHKPENIVIEMARENQTTQKGQKNSRER |
| | | MKRIEEGIKELGSQILKEHPVENTQLQNEK |
| | | LYLYYLQNGRDMYVDQELDINRLSDYDVDH |
| | | IVPQSFLKDDSIDNKVLTRSDKNRGKSDNV |
| | | PSEEVVKKMKNYWRQLLNAKLITQRKFDNL |
| | | TKAERGGLSELDKAGFIKRQLVETRQITKH |
| | | VAQILDSRMNTKYDENDKLIREVKVITLKS |
| | | KLVSDFRKDFQFYKVREINNYHHAHDAYLN |
| | | AVVGTALIKKYPKLESEFVYGDYKVYDVRK |
| | | MIAKSEQEIGKATAKYFFYSNIMNFFKTEI |
| | | TLANGEIRKRPLIETNGETGEIVWDKGRDF |
| | | ATVRKVLSMPQVNIVKKTEVQTGGFSKESI |
| | | LPKRNSDKLIARKKDWDPKKYGGFDSPTVA |
| | | YSVLVVAKVEKGKSKKLKSVKELLGITIME |
| | | RSSFEKNPIDFLEAKGYKEVKKDLIIKLPK |
| | | YSLFELENGRKRMLASAGELQKGNELALPS |
| | | KYVNFLYLASHYEKLKGSPEDNEQKQLFVE |
| | | QHKHYLDEIIEQISEFSKRVILADANLDKV |
| | | LSAYNKHRMNHRVEITEGILADECAALLCY |
| | | FFRMPRQVFNAQKKAQSSTDGSSGSETPGT |
| | | SESATPESSGSEVEFSHEYWMRHALTLAKR |
| | | ARDEREVPVGAVLVLNNRVIGEGWNRAIGL |
| | | HDPTAHAEIMALRQGGLVMQNYRLIDATLY |
| | | VTFEPCVMCAGAMIHSRIGRVVFGVRNAKT |
| | | GAAGSLMDVLHYPGDKPIREQAENIIHLFT |
| | | LTNLGAPAAFKYFDTTIDRKRYTSTKEVLD |
| | | ATLIHQSITGLYETRIDLSQLGGD |
| 124 Cas9 | 1352 | MDKKYSIGLAIGTNSVGWAVITDEYKVPSK |
| delta | | KFKVLGNTDRHSIKKNLIGALLFDSGETAE |
| 792-872 | | ATRLKRTARRRYTRRKNRICYLQEIFSNEM |
| TadAins | | AKVDDSFFHRLEESFLVEEDKKHERHPIFG |
| polypeptide | | NIVDEVAYHEKYPTIYHLRKKLVDSTDKAD |
| sequence | | LRLIYLALAHMIKFRGHFLIEGDLNPDNSD |
| | | VDKLFIQLVQTYNQLFEENPINASGVDAKA |
| | | ILSARLSKSRRLENLIAQLPGEKKNGLFGN |
| | | LIALSLGLTPNFKSNFDLAEDAKLQLSKDT |
| | | YDDDLDNLLAQIGDQYADLFLAAKNLSDAI |
| | | LLSDILRVNTEITKAPLSASMIKRYDEHHQ |
| | | D |
| | | LTLLKALVRQQLPEKYKEIFFDQSKNGYAG |
| | | YIDGGASQEEFYKFIKPILEKMDGTEELLV |
| | | KLNREDLLRKQRTFDNGSIPHQIHLGELHA |
| | | ILRRQEDFYPFLKDNREKIEKILTFRIPYY |
| | | VGPLARGNSRFAWMTRKSEETITPWNFEEV |
| | | VDKGASAQSFIERMTNFDKNLPNEKVLPKH |
| | | SLLYEYFTVYNELTKVKYVTEGMRKPAFLS |
| | | GEQKKAIVDLLFKTNRKVTVKQLKEDYFKK |
| | | IECFDSVEISGVEDRFNASLGTYHDLLKII |
| | | KDKDFLDNEENEDILEDIVLTLTLFEDREM |
| | | IEERLKTYAHLFDDKVMKQLKRRRYTGWGR |
| | | LSRKLINGIRDKQSGKTILDFLKSDGFANR |
| | | NFMQLIHDDSLTFKEDIQKAQVSGQGDSLH |
| | | EHIANLAGSPAIKKGILQTVKVVDELVKVM |
| | | GRHKPENIVIEMARENQTTQKGQKNSRERM |
| | | KRIEEGIKELGSEVEFSHEYWMRHALTLAK |
| | | RARDEREVPVGAVLVLNNRVIGEGWNRAIG |
| | | LHDPTAHAEIMALRQGGLVMQNYRLIDATL |
| | | YVTFEPCVMCAGAMIHSRIGRVVFGVRNAK |
| | | TGAAGSLMDVLHYPGMNHRVEITEGILADE |
| | | CAALLCYFFRMPRQVFNAQKKAQSSTDEEV |
| | | VKKMKNYWRQLLNAKLITQRKFDNLTKAER |
| | | GGLSELDKAGFIKRQLVETRQITKHVAQIL |
| | | DSRMNTKYDENDKLIREVKVITLKSKLVSD |
| | | FRKDFQFYKVREINNYHHAHDAYLNAVVGT |
| | | ALIKKYPKLESEFVYGDYKVYDVRKMIAKS |
| | | EQEIGKATAKYFFYSNIMNFFKTEITLANG |
| | | EIRKRPLIETNGETGEIVWDKGRDFATVRK |
| | | VLSMPQVNIVKKTEVQTGGFSKESILPKRN |
| | | SDKLIARKKDWDPKKYGGFDSPTVAYSVLV |
| | | VAKVEKGKSKKLKSVKELLGITIMERSSFE |
| | | KNPIDFLEAKGYKEVKKDLIIKLPKYSLFE |
| | | LENGRKRMLASAGELQKGNELALPSKYVNF |
| | | LYLASHYEKLKGSPEDNEQKQLFVEQHKHY |
| | | LDEIIEQISEFSKRVILADANLDKVLSAYN |
| | | KHRDKPIREQAENIIHLFTLTNLGAPAAFK |
| | | YFDTTIDRKRYTSTKEVLDATLIHQSITGL |
| | | YETRIDLSQLGGD |
| 125 Cas9 | 1353 | MDKKYSIGLAIGTNSVGWAVITDEYKVPSK |
| delta | | KFKVLGNTDRHSIKKNLIGALLFDSGETAE |
| 792-906 | | ATRLKRTARRRYTRRKNRICYLQEIFSNEM |
| TadAins | | AKVDDSFFHRLEESFLVEEDKKHERHPIFG |
| polypeptide | | NIVDEVAYHEKYPTIYHLRKKLVDSTDKAD |
| sequence | | LRLIYLALAHMIKFRGHFLIEGDLNPDNSD |
| | | VDKLFIQLVQTYNQLFEENPINASGVDAKA |
| | | ILSARLSKSRRLENLIAQLPGEKKNGLFGN |
| | | LIALSLGLTPNFKSNFDLAEDAKLQLSKDT |
| | | YDDDLDNLLAQIGDQYADLFLAAKNLSDAI |
| | | LLSDILRVNTEITKAPLSASMIKRYDEHHQ |
| | | DLTLLKALVRQQLPEKYKEIFFDQSKNGYA |
| | | GYIDGGASQEEFYKFIKPILEKMDGTEELL |
| | | VKLNREDLLRKQRTFDNGSIPHQIHLGELH |
| | | AILRRQEDFYPFLKDNREKIEKILTFRIPY |
| | | YVGPLARGNSRFAWMTRKSEETITPWNFEE |
| | | VVDKGASAQSFIERMTNFDKNLPNEKVLPK |
| | | HSLLYEYFTVYNELTKVKYVTEGMRKPAFL |
| | | SGEQKKAIVDLLFKTNRKVTVKQLKEDYFK |
| | | KIECFDSVEISGVEDRFNASLGTYHDLLKI |
| | | IKDKDFLDNEENEDILEDIVLTLTLFEDRE |
| | | MIEERLKTYAHLFDDKVMKQLKRRRYTGWG |
| | | RLSRKLINGIRDKQSGKTILDFLKSDGFAN |
| | | RNFMQLIHDDSLTFKEDIQKAQVSGQGDSL |
| | | HEHIANLAGSPAIKKGILQTVKVVDELVKV |
| | | MGRHKPENIVIEMARENQTTQKGQKNSRER |
| | | MKRIEEGIKELGSEVEFSHEYWMRHALTLA |
| | | KRARDEREVPVGAVLVLNNRVIGEGWNRAI |
| | | GLHDPTAHAEIMALRQGGLVMQNYRLIDAT |
| | | LYVTFEPCVMCAGAMIHSRIGRVVFGVRNA |
| | | KTGAAGSLMDVLHYPGMNHRVEITEGILAD |
| | | ECAALLCYFFRMPRQVFNAQKKAQSSTDGL |
| | | SELDKAGFIKRQLVETRQITKHVAQILDSR |
| | | MNTKYDENDKLIREVKVITLKSKLVSDFRK |
| | | DFQFYKVREINNYHHAHDAYLNAVVGTALI |
| | | KKYPKLESEFVYGDYKVYDVRKMIAKSEQE |
| | | IGKATAKYFFYSNIMNFFKTEITLANGEIR |
| | | KRPLIETNGETGEIVWDKGRDFATVRKVLS |
| | | MPQVNIVKKTEVQTGGFSKESILPKRNSDK |
| | | LIARKKDWDPKKYGGFDSPTVAYSVLWAKV |
| | | EKGKSKKLKSVKELLGITIMERSSFEKNPI |
| | | DFLEAKGYKEVKKDLIIKLPKYSLFELENG |
| | | RKRMLASAGELQKGNELALPSKYVNFLYLA |
| | | SHYEKLKGSPEDNEQKQLFVEQHKHYLDEI |
| | | IEQISEFSKRVILADANLDKVLSAYNKHRD |
| | | KPIREQAENIIHLFTLTNLGAPAAFKYFDT |
| | | TIDRKRYTSTKEVLDATLIHQSITGLYETR |
| | | IDLSQLGGD |
| 126 TadA | 1354 | MDKKYSIGLAIGTNSVGWAVITDEYKVPSK |
| CP65ins | | KFKVLGNTDRHSIKKNLIGALLFDSGETAE |
| 1003 | | ATRLKRTARRRYTRRKNRICYLQEIFSNEM |
| polypeptide | | AKVDDSFFHRLEESFLVEEDKKHERHPIFG |
| sequence | | NIVDEVAYHEKYPTIYHLRKKLVDSTDKAD |
| | | LRLIYLALAFMIKFRGHFLIEGDLNPDNSD |
| | | VDKLFIQLVQTYNQLFEENPINASGVDAKA |
| | | ILSARLSKSRRLENLIAQLPGEKKNGLFGN |
| | | LIALSLGLTPNFKSNFDLAEDAKLQLSKDT |
| | | YDDDLDNLLAQIGDQYADLFLAAKNLSDAI |
| | | LLSDILRVNTEITKAPLSASMIKRYDEHHQ |
| | | DLTLLKALVRQQLPEKYKEIFFDQSKNGYA |
| | | GYIDGGASQEEFYKFIKPILEKMDGTEELL |
| | | VKLNREDLLRKQRTFDNGSIPHQIHLGELH |
| | | AILRRQEDFYPFLKDNREKIEKILTFRIPY |
| | | YVGPLARGNSRFAWMTRKSEETITPWNFEE |
| | | VVDKGASAQSFIERMTNFDKNLPNEKVLPK |
| | | HSLLYEYFTVYNELTKVKYVTEGMRKPAFL |
| | | SGEQKKAIVDLLFKTNRKVTVKQLKEDYFK |
| | | KIECFDSVEISGVEDRFNASLGTYHDLLKI |
| | | IKDKDFLDNEENEDILEDIVLTLTLFEDRE |
| | | MIEERLKTYAHLFDDKVMKQLKRRRYTGWG |
| | | RLSRKLINGIRDKQSGKTILDFLKSDGFAN |
| | | RNFMQLIHDDSLTFKEDIQKAQVSGQGDSL |
| | | HEHIANLAGSPAIKKGILQTVKVVDELVKV |
| | | MGRHKPENIVIEMARENQTTQKGQKNSRER |
| | | MKRIEEGIKELGSQILKEHPVENTQLQNEK |
| | | LYLYYLQNGRDMYVDQELDINRLSDYDVDH |
| | | IVPQSFLKDDSIDNKVLTRSDKNRGKSDNV |
| | | PSEEVVKKMKNYWRQLLNAKLITQRKFDNL |
| | | TKAERGGLSELDKAGFIKRQLVETRQITKH |
| | | VAQILDSRMNTKYDENDKLIREVKVITLKS |
| | | KLVSDFRKDFQFYKVREINNYHHAHDAYLN |
| | | AVVGTALIKKYPKTAHAEIMALRQGGLVMQ |
| | | NYRLIDATLYVTFEPCVMCAGAMIHSRIGR |
| | | VVFGVRNAKTGAAGSLMDVLHYPGMNHRVE |
| | | ITEGILADECAALLCYFFRMPRQVFNAQKK |
| | | AQSSTDGSSGSETPGTSESATPESSGSEVE |
| | | FSHEYWMRHALTLAKRARDEREVPVGAVLV |
| | | LNNRVIGEGWNRAIGLHDPLESEFVYGDYK |
| | | VYDVRKMIAKSEQEIGKATAKYFFYSNIMN |
| | | FFKTEITLANGEIRKRPLIETNGETGEIVW |
| | | DKGRDFATVRKVLSMPQVNIVKKTEVQTGG |
| | | FSKESILPKRNSDKLIARKKDWDPKKYGGF |
| | | DSPTVAYSVLWAKVEKGKSKKLKSVKELLG |
| | | ITIMERSSFEKNPIDFLEAKGYKEVKKDLI |
| | | IKLPKYSLFELENGRKRMLASAGELQKGNE |
| | | LALPSKYVNFLYLASHYEKLKGSPEDNEQK |
| | | QLFVEQHKHYLDEIIEQISEFSKRVILADA |
| | | NLDKVLSAYNKHRDKPIREQAENIIHLFTL |
| | | TNLGAPAAFKYFDTTIDRKRYTSTKEVLDA |
| | | TLIHQSITGLYETRIDLSQLGGD |
| 127 TadA | 1355 | MDKKYSIGLAIGTNSVGWAVITDEYKVPSK |
| CP65ins | | KFKVLGNTDRHSIKKNLIGALLFDSGETAE |
| 1016 | | ATRLKRTARRRYTRRKNRICYLQEIFSNEM |
| polypeptide | | AKVDDSFFHRLEESFLVEEDKKHERHPIFG |
| sequence | | NIVDEVAYHEKYPTIYHLRKKLVDSTDKAD |
| | | LRLIYLALAHMIKFRGHFLIEGDLNPDNSD |
| | | VDKLFIQLVQTYNQLFEENPINASGVDAKA |
| | | ILSARLSKSRRLENLIAQLPGEKKNGLFGN |
| | | LIALSLGLTPNFKSNFDLAEDAKLQLSKDT |
| | | YDDDLDNLLAQIGDQYADLFLAAKNLSDAI |
| | | LLSDILRVNTEITKAPLSASMIKRYDEHHQ |
| | | DLTLLKALVRQQLPEKYKEIFFDQSKNGYA |
| | | GYIDGGASQEEFYKFIKPILEKMDGTEELL |
| | | VKLNREDLLRKQRTFDNGSIPHQIHLGELH |
| | | AILRRQEDFYPFLKDNREKIEKILTFRIPY |
| | | YVGPLARGNSRFAWMTRKSEETITPWNFEE |
| | | VVDKGASAQSFIERMTNFDKNLPNEKVLPK |
| | | HSLLYEYFTVYNELTKVKYVTEGMRKPAFL |
| | | SGEQKKAIVDLLFKTNRKVTVKQLKEDYFK |
| | | KIECFDSVEISGVEDRFNASLGTYHDLLKI |
| | | IKDKDFLDNEENEDILEDIVLTLTLFEDRE |
| | | MIEERLKTYAHLFDDKVMKQLKRRRYTGWG |
| | | RLSRKLINGIRDKQSGKTILDFLKSDGFAN |
| | | RNFMQLIHDDSLTFKEDIQKAQVSGQGDSL |
| | | HEHIANLAGSPAIKKGILQTVKVVDELVKV |
| | | MGRHKPENIVIEMARENQTTQKGQKNSRER |
| | | MKRIEEGIKELGSQILKEHPVENTQLQNEK |
| | | LYLYYLQNGRDMYVDQELDINRLSDYDVDH |
| | | IVPQSFLKDDSIDNKVLTRSDKNRGKSDNV |
| | | PSEEVVKKMKNYWRQLLNAKLITQRKFDNL |
| | | TKAERGGLSELDKAGFIKRQLVETRQITKH |
| | | VAQILDSRMNTKYDENDKLIREVKVITLKS |
| | | KLVSDFRKDFQFYKVREINNYHHAHDAYLN |
| | | AVVGTALIKKYPKLESEFVYGDYKVTAHAE |
| | | IMALRQGGLVMQNYRLIDATLYVTFEPCVM |
| | | CAGAMIHSRIGRVVFGVRNAKTGAAGSLMD |
| | | VLHYPGMNHRVEITEGILADECAALLCYFF |
| | | RMPRQVFNAQKKAQSSTDGSSGSETPGTSE |
| | | SATPESSGSEVEFSHEYWMRHALTLAKRAR |
| | | DEREVPVGAVLVLNNRVIGEGWNRAIGLHD |
| | | PYDVRKMIAKSEQEIGKATAKYFFYSNIMN |
| | | FFKTEITLANGEIRKRPLIETNGETGEIVW |
| | | DKGRDFATVRKVLSMPQVNIVKKTEVQTGG |
| | | FSKESILPKRNSDKLIARKKDWDPKKYGGF |
| | | DSPTVAYSVLWAKVEKGKSKKLKSVKELLG |
| | | ITIMERSSFEKNPIDFLEAKGYKEVKKDLI |
| | | IKLPKYSLFELENGRKRMLASAGELQKGNE |
| | | LALPSKYVNFLYLASHYEKLKGSPEDNEQK |
| | | QLFVEQHKHYLDEIIEQISEFSKRVILADA |
| | | NLDKVLSAYNKHRDKPIREQAENIIHLFTL |
| | | TNLGAPAAFKYFDTTIDRKRYTSTKEVLDA |
| | | TLIHQSITGLYETRIDLSQLGGD |
| 128 TadA | 1356 | MDKKYSIGLAIGTNSVGWAVITDEYKVPSK |
| CP65ins | | KFKVLGNTDRHSIKKNLIGALLFDSGETAE |
| 1022 | | ATRLKRTARRRYTRRKNRICYLQEIFSNEM |
| polypeptide | | AKVDDSFFHRLEESFLVEEDKKHERHPIFG |
| sequence | | NIVDEVAYHEKYPTIYHLRKKLVDSTDKAD |
| | | LRLIYLALAHMIKFRGHFLIEGDLNPDNSD |
| | | VDKLFIQLVQTYNQLFEENPINASGVDAKA |
| | | ILSARLSKSRRLENLIAQLPGEKKNGLFGN |
| | | LIALSLGLTPNFKSNFDLAEDAKLQLSKDT |
| | | YDDDLDNLLAQIGDQYADLFLAAKNLSDAI |
| | | LLSDILRVIMTEITKAPLSASMIKRYDEHH |
| | | QDLTLLKALVRQQLPEKYKEIFFDQSKNGY |
| | | AGYIDGGASQEEFYKFIKPILEKMDGTEEL |
| | | LVKLNREDLLRKQRTFDNGSIPHQIHLGEL |
| | | HAILRRQEDFYPFLKDNREKIEKILTFRIP |
| | | YYVGPLARGNSRFAWMTRKSEETITPWNFE |
| | | EVVDKGASAQSFIERMTNFDKNLPNEKVLP |
| | | KHSLLYEYFTVYNELTKVKYVTEGMRKPAF |
| | | LSGEQKKAIVDLLFKTNRKVTVKQLKEDYF |
| | | KKIECFDSVEISGVEDRFNASLGTYHDLLK |
| | | IIKDKDFLDNEENEDILEDIVLTLTLFEDR |
| | | EMIEERLKTYAHLFDDKVMKQLKRRRYTGW |
| | | GRLSRKLINGIRDKQSGKTILDFLKSDGFA |
| | | NRNFMQLIHDDSLTFKEDIQKAQVSGQGDS |
| | | LHEHIANLAGSPAIKKGILQTVKVVDELVK |
| | | VMGRHKPENIVIEMARENQTTQKGQKNSRE |
| | | RMKRIEEGIKELGSQILKEHPVENTQLQNE |
| | | KLYLYYLQNGRDMYVDQELDINRLSDYDVD |
| | | HIVPQSFLKDDSIDNKVLTRSDKNRGKSDN |
| | | VPSEEVVKKMKNYWRQLLNAKLITQRKFDN |
| | | LTKAERGGLSELDKAGFIKRQLVETRQITK |
| | | HVAQILDSRMNTKYDENDKLIREVKVITLK |
| | | SKLVSDFRKDFQFYKVREINNYHHAHDAYL |
| | | NAVVGTALIKKYPKLESEFVYGDYKVYDVR |
| | | KMITAHAEIMALRQGGLVMQNYRLIDATLY |
| | | VTFEPCVMCAGAMIHSRIGRWFGVRNAKTG |
| | | AAGSLMDVLHYPGMNHRVEITEGILADECA |
| | | ALLCYFFRMPRQVFNAQKKAQSSTDGSSGS |
| | | ETPGTSESATPESSGSEVEFSHEYWMRHAL |
| | | TLAKRARDEREVPVGAVLVLNNRVIGEGWN |
| | | RAIGLHDPAKSEQEIGKATAKYFFYSNIMN |
| | | FFKTEITLANGEIRKRPLIETNGETGEIVW |
| | | DKGRDFATVRKVLSMPQVNIVKKTEVQTGG |
| | | FSKESILPKRNSDKLIARKKDWDPKKYGGF |
| | | DSPTVAYSVLVVAKVEKGKSKKLKSVKELL |
| | | GITIMERSSFEKNPIDFLEAKGYKEVKKDL |
| | | IIKLPKYSLFELENGRKRMLASAGELQKGN |
| | | ELALPSKYVNFLYLASHYEKLKGSPEDNEQ |
| | | KQLFVEQHKHYLDEIIEQISEFSKRVILAD |
| | | ANLDKVLSAYNKHRDKPIREQAENIIHLFT |
| | | LTNLGAPAAFKYFDTTIDRKRYTSTKEVLD |
| | | ATLIHQSITGLYETRIDLSQLGGD |
| 129 TadA | 1357 | MDKKYSIGLAIGTNSVGWAVITDEYKVPSK |
| CP65ins | | KFKVLGNTDRHSIKKNLIGALLFDSGETAE |
| 1029 | | ATRLKRTARRRYTRRKNRICYLQEIFSNEM |
| polypeptide | | AKVDDSFFHRLEESFLVEEDKKHERHPIFG |
| sequence | | NIVDEVAYHEKYPTIYHLRKKLVDSTDKAD |
| | | LRLIYLALAHMIKFRGHFLIEGDLNPDNSD |
| | | VDKLFIQLVQTYNQLFEENPINASGVDAKA |
| | | ILSARLSKSRRLENLIAQLPGEKKNGLFGN |
| | | LIALSLGLTPNFKSNFDLAEDAKLQLSKDT |
| | | YDDDLDNLLAQIGDQYADLFLAAKNLSDAI |
| | | LLSDILRVNTEITKAPLSASMIKRYDEHHQ |
| | | DLTLLKALVRQQLPEKYKEIFFDQSKNGYA |
| | | GYIDGGASQEEFYKFIKPILEKMDGTEELL |
| | | VKLNREDLLRKQRTFDNGSIPHQIHLGELH |
| | | AILRRQEDFYPFLKDNREKIEKILTFRIPY |
| | | YVGPLARGNSRFAWMTRKSEETITPWNFEE |
| | | VVDKGASAQSFIERMTNFDKNLPNEKVLPK |
| | | HSLLYEYFTVYNELTKVKYVTEGMRKPAFL |
| | | SGEQKKAIVDLLFKTNRKVTVKQLKEDYFK |
| | | KIECFDSVEISGVEDRFNASLGTYHDLLKI |
| | | IKDKDFLDNEENEDILEDIVLTLTLFEDRE |
| | | MIEERLKTYAHLFDDKVMKQLKRRRYTGWG |
| | | RLSRKLINGIRDKQSGKTILDFLKSDGFAN |
| | | RNFMQLIHDDSLTFKEDIQKAQVSGQGDSL |
| | | HEHIANLAGSPAIKKGILQTVKVVDELVKV |
| | | MGRHKPENIVIEMARENQTTQKGQKNSRER |
| | | MKRIEEGIKELGSQILKEHPVENTQLQNEK |
| | | LYLYYLQNGRDMYVDQELDINRLSDYDVDH |
| | | IVPQSFLKDDSIDNKVLTRSDKNRGKSDNV |
| | | PSEEVVKKMKNYWRQLLNAKLITQRKFDNL |
| | | TKAERGGLSELDKAGFIKRQLVETRQITKH |
| | | VAQILDSRMNTKYDENDKLIREVKVITLKS |
| | | KLVSDFRKDFQFYKVREINNYHHAHDAYLN |
| | | AVVGTALIKKYPKLESEFVYGDYKVYDVRK |
| | | MIAKSEQEITAHAEIMALRQGGLVMQNYRL |
| | | IDATLYVTFEPCVMCAGAMIHSRIGRVVFG |
| | | VRNAKTGAAGSLMDVLHYPGMNHRVEITEG |
| | | ILADECAALLCYFFRMPRQVFNAQKKAQSS |
| | | TDGSSGSETPGTSESATPESSGSEVEFSHE |
| | | YWMRHALTLAKRARDEREVPVGAVLVLNNR |
| | | VIGEGWNRAIGLHDPGKATAKYFFYSNIMN |
| | | FFKTEITLANGEIRKRPLIETNGETGEIVW |
| | | DKGRDFATVRKVLSMPQVNIVKKTEVQTGG |
| | | FSKESILPKRNSDKLIARKKDWDPKKYGGF |
| | | DSPTVAYSVLWAKVEKGKSKKLKSVKELLG |
| | | ITIMERSSFEKNPIDFLEAKGYKEVKKDLI |
| | | IKLPKYSLFELENGRKRMLASAGELQKGNE |
| | | LALPSKYVNFLYLASHYEKLKGSPEDNEQK |
| | | QLFVEQHKHYLDEIIEQISEFSKRVILADA |
| | | NLDKVLSAYNKHRDKPIREQAENIIHLFTL |
| | | TNLGAPAAFKYFDTTIDRKRYTSTKEVLDA |
| | | TLIHQSITGLYETRIDLSQLGGD |
| 130 TadA | 1358 | MDKKYSIGLAIGTNSVGWAVITDEYKVPSK |
| CP65ins | | KFKVLGNTDRHSIKKNLIGALLFDSGETAE |
| 1041 | | ATRLKRTARRRYTRRKNRICYLQEIFSNEM |
| polypeptide | | AKVDDSFFHRLEESFLVEEDKKHERHPIFG |
| sequence | | NIVDEVAYHEKYPTIYHLRKKLVDSTDKAD |
| | | LRLIYLALAHMIKFRGHFLIEGDLNPDNSD |
| | | VDKLFIQLVQTYNQLFEENPINASGVDAKA |
| | | ILSARLSKSRRLENLIAQLPGEKKNGLFGN |
| | | LIALSLGLTPNFKSNFDLAEDAKLQLSKDT |
| | | YDDDLDNLLAQIGDQYADLFLAAKNLSDAI |
| | | LLSDILRVNTEITKAPLSASMIKRYDEHHQ |
| | | DLTLLKALVRQQLPEKYKEIFFDQSKNGYA |
| | | GYIDGGASQEEFYKFIKPILEKMDGTEELL |
| | | VKLNREDLLRKQRTFDNGSIPHQIHLGELH |
| | | AILRRQEDFYPFLKDNREKIEKILTFRIPY |
| | | YVGPLARGNSRFAWMTRKSEETITPWNFEE |
| | | VVDKGASAQSFIERMTNFDKNLPNEKVLPK |
| | | HSLLYEYFTVYNELTKVKYVTEGMRKPAFL |
| | | SGEQKKAIVDLLFKTNRKVTVKQLKEDYFK |
| | | KIECFDSVEISGVEDRFNASLGTYHDLLKI |
| | | IKDKDFLDNEENEDILEDIVLTLTLFEDRE |
| | | MIEERLKTYAHLFDDKVMKQLKRRRYTGWG |
| | | RLSRKLINGIRDKQSGKTILDFLKSDGFAN |
| | | RNFMQLIHDDSLTFKEDIQKAQVSGQGDSL |
| | | HEHIANLAGSPAIKKGILQTVKVVDELVKV |
| | | MGRHKPENIVIEMARENQTTQKGQKNSRER |
| | | MKRIEEGIKELGSQILKEHPVENTQLQNEK |
| | | LYLYYLQNGRDMYVDQELDINRLSDYDVDH |
| | | IVPQSFLKDDSIDNKVLTRSDKNRGKSDNV |
| | | PSEEVVKKMKNYWRQLLNAKLITQRKFDNL |
| | | TKAERGGLSELDKAGFIKRQLVETRQITKH |
| | | VAQILDSRMNTKYDENDKLIREVKVITLKS |
| | | KLVSDFRKDFQFYKVREINNYHHAHDAYLN |
| | | AVVGTALIKKYPKLESEFVYGDYKVYDVRK |
| | | MIAKSEQEIGKATAKYFFYSTAHAEIMALR |
| | | QGGLVMQNYRLIDATLYVTFEPCVMCAGAM |
| | | IHSRIGRWFGVRNAKTGAAGSLMDVLHYPG |
| | | MNHRVEITEGILADECAALLCYFFRMPRQV |
| | | FNAQKKAQSSTDGSSGSETPGTSESATPES |
| | | SGSEVEFSHEYWMRHALTLAKRARDEREVP |
| | | VGAVLVLNNRVIGEGWNRAIGLHDPNIMNF |
| | | FKTEITLANGEIRKRPLIETNGETGEIVWD |
| | | KGRDFATVRKVLSMPQVNIVKKTEVQTGGF |
| | | SKESILPKRNSDKLIARKKDWDPKKYGGFD |
| | | SPTVAYSVLVVAKVEKGKSKKLKSVKELLG |
| | | ITIMERSSFEKNPIDFLEAKGYKEVKKDLI |
| | | IKLPKYSLFELENGRKRMLASAGELQKGNE |
| | | LALPSKYVNFLYLASHYEKLKGSPEDNEQK |
| | | QLFVEQHKHYLDEIIEQISEFSKRVILADA |
| | | NLDKVLSAYNKHRDKPIREQAENIIHLFTL |
| | | TNLGAPAAFKYFDTTIDRKRYTSTKEVLDA |
| | | TLIHQSITGLYETRIDLSQLGGD |
| 131 TadA | 1359 | MDKKYSIGLAIGTNSVGWAVITDEYKVPSK |
| CP65ins | | KFKVLGNTDRHSIKKNLIGALLFDSGETAE |
| 1054 | | ATRLKRTARRRYTRRKNRICYLQEIFSNEM |
| polypeptide | | AKVDDSFFHRLEESFLVEEDKKHERHPIFG |
| sequence | | NIVDEVAYHEKYPTIYHLRKKLVDSTDKAD |
| | | LRLIYLALAHMIKFRGHFLIEGDLNPDNSD |
| | | VDKLFIQLVQTYNQLFEENPINASGVDAKA |
| | | ILSARLSKSRRLENLIAQLPGEKKNGLFGN |
| | | LIALSLGLTPNFKSNFDLAEDAKLQLSKDT |
| | | YDDDLDNLLAQIGDQYADLFLAAKNLSDAI |
| | | LLSDILRVNTEITKAPLSASMIKRYDEHHQ |
| | | DLTLLKALVRQQLPEKYKEIFFDQSKNGYA |
| | | GYIDGGASQEEFYKFIKPILEKMDGTEELL |
| | | VKLNREDLLRKQRTFDNGSIPHQIHLGELH |
| | | AILRRQEDFYPFLKDNREKIEKILTFRIPY |
| | | YVGPLARGNSRFAWMTRKSEETITPWKFEE |
| | | WDKGASAQSFIERMTNFDKNLPKEKVLPKH |
| | | SLLYEYFTVYNELTKVKYVTEGMRKPAFLS |
| | | GEQKKAIVDLLFKTNRKVTVKQLKEDYFKK |
| | | IECFDSVEISGVEDRFNASLGTYHDLLKII |
| | | KDKDFLDNEENEDILEDIVLTLTLFEDREM |
| | | IEERLKTYAHLFDDKVMKQLKRRRYTGWGR |
| | | LSRKLINGIRDKQSGKTILDFLKSDGFANR |
| | | NFMQLIHDDSLTFKEDIQKAQVSGQGDSLH |
| | | EHIANLAGSPAIKKGILQTVKWDELVKVMG |
| | | RHKPENIVIEMARENQTTQKGQKNSRERMK |
| | | RIEEGIKELGSQILKEHPVENTQLQNEKLY |
| | | LYYLQNGRDMYVDQELDINRLSDYDVDHIV |
| | | PQSFLKDDSIDNKVLTRSDKNRGKSDNVPS |
| | | EEVVKKMKNYWRQLLNAKLITQRKFDNLTK |
| | | AERGGLSELDKAGFIKRQLVETRQITKHVA |
| | | QILDSRMNTKYDENDKLIREVKVITLKSKL |
| | | VSDFRKDFQFYKVREINNYHHAHDAYLNAV |
| | | VGTALIKKYPKLESEFVYGDYKVYDVRKMI |
| | | AKSEQEIGKATAKYFFYSNIMNFFKTEITL |
| | | ANTAHAEIMALRQGGLVMQNYRLIDATLYV |
| | | TFEPCVMCAGAMIHSRIGRWFGVRNAKTGA |
| | | AGSLMDVLHYPGMNHRVEITEGILADECAA |
| | | LLCYFFRMPRQVFNAQKKAQSSTDGSSGSE |
| | | TPGTSESATPESSGSEVEFSHEYWMRHALT |
| | | LAKRARDEREVPVGAVLVLNNRVIGEGWNR |
| | | AIGLHDPGEIRKRPLIETNGETGEIVWDKG |
| | | RDFATVRKVLSMPQVNIVKKTEVQTGGFSK |
| | | ESILPKRNSDKLIARKKDWDPKKYGGFDSP |
| | | TVAYSVLVVAKVEKGKSKKLKSVKELLGIT |
| | | IMERSSFEKNPIDFLEAKGYKEVKKDLIIK |
| | | LPKYSLFELENGRKRMLASAGELQKGNELA |
| | | LPSKYVNFLYLASHYEKLKGSPEDNEQKQL |
| | | FVEQHKHYLDEIIEQISEFSKRVILADANL |
| | | DKVLSAYNKHRDKPIREQAENIIHLFTLTN |
| | | LGAPAAFKYFDTTIDRKRYTSTKEVLDATL |
| | | IHQSITGLYETRIDLSQLGGD |
| 132 TadA | 1360 | MDKKYSIGLAIGTNSVGWAVITDEYKVPSK |
| CP65ins | | KFKVLGNTDRHSIKKNLIGALLFDSGETAE |
| 1246 | | ATRLKRTARRRYTRRKNRICYLQEIFSNEM |
| polypeptide | | AKVDDSFFHRLEESFLVEEDKKHERHPIFG |
| sequence | | NIVDEVAYHEKYPTIYHLRKKLVDSTDKAD |
| | | LRLIYLALAHMIKFRGHFLIEGDLNPDNSD |
| | | VDKLFIQLVQTYNQLFEENPINASGVDAKA |
| | | ILSARLSKSRRLENLIAQLPGEKKNGLFGN |
| | | LIALSLGLTPNFKSNFDLAEDAKLQLSKDT |
| | | YDDDLDNLLAQIGDQYADLFLAAKNLSDAI |
| | | LLSDILRVNTEITKAPLSASMIKRYDEHHQ |
| | | DLTLLKALVRQQLPEKYKEIFFDQSKNGYA |
| | | GYIDGGASQEEFYKFIKPILEKMDGTEELL |
| | | VKLNREDLLRKQRTFDNGSIPHQIHLGELH |
| | | AILRRQEDFYPFLKDNREKIEKILTFRIPY |
| | | YVGPLARGNSRFAWMTRKSEETITPWNFEE |
| | | VVDKGASAQSFIERMTNFDKNLPNEKVLPK |
| | | HSLLYEYFTVYNELTKVKYVTEGMRKPAFL |
| | | SGEQKKAIVDLLFKTNRKVTVKQLKEDYFK |
| | | KIECFDSVEISGVEDRFNASLGTYHDLLKI |
| | | IKDKDFLDNEENEDILEDIVLTLTLFEDRE |
| | | MIEERLKTYAHLFDDKVMKQLKRRRYTGWG |
| | | RLSRKLINGIRDKQSGKTILDFLKSDGFAN |
| | | RNFMQLIHDDSLTFKEDIQKAQVSGQGDSL |
| | | HEHIANLAGSPAIKKGILQTVKVVDELVKV |
| | | MGRHKPENIVIEMARENQTTQKGQKNSRER |
| | | MKRIEEGIKELGSQILKEHPVENTQLQNEK |
| | | LYLYYLQNGRDMYVDQELDINRLSDYDVDH |
| | | IVPQSFLKDDSIDNKVLTRSDKNRGKSDNV |
| | | PSEEVVKKMKNYWRQLLNAKLITQRKFDNL |
| | | TKAERGGLSELDKAGFIKRQLVETRQITKH |
| | | VAQILDSRMNTKYDENDKLIREVKVITLKS |
| | | KLVSDFRKDFQFYKVREINNYHHAHDAYLN |
| | | AVVGTALIKKYPKLESEFVYGDYKVYDVRK |
| | | MIAKSEQEIGKATAKYFFYSNIMNFFKTEI |
| | | TLANGEIRKRPLIETNGETGEIVWDKGRDF |
| | | ATVRKVLSMPQVNIVKKTEVQTGGFSKESI |
| | | LPKRNSDKLIARKKDWDPKKYGGFDSPTVA |
| | | YSVLVVAKVEKGKSKKLKSVKELLGITIME |
| | | RSSFEKNPIDFLEAKGYKEVKKDLIIKLPK |
| | | YSLFELENGRKRMLASAGELQKGNELALPS |
| | | KYVNFLYLASHYEKLKGTAHAEIMALRQGG |
| | | LVMQNYRLIDATLYVTFEPCVMCAGAMIHS |
| | | RIGRWFGVRNAKTGAAGSLMDVLHYPGMNH |
| | | RVEITEGILADECAALLCYFFRMPRQVFNA |
| | | QKKAQSSTDGSSGSETPGTSESATPESSGS |
| | | EVEFSHEYWMRHALTLAKRARDEREVPVGA |
| | | VLVLNNRVIGEGWNRAIGLHDPSPEDNEQK |
| | | QLFVEQHKHYLDEIIEQISEFSKRVILADA |
| | | NLDKVLSAYNKHRDKPIREQAENIIHLFTL |
| | | TNLGAPAAFKYFDTTIDRKRYTSTKEVLDA |
| | | TLIHQSITGLYETRIDLSQLGGD |
| TadA | 1363 | MGSHMTNDIYFMTLAIEEAKKAAQLGEVPI |
| polypeptide | | GAIITKDDEVIARAHNLRETLQQPTAHAEH |
| sequence | | IAIERAAKVLGSWRLEGCTLYVTLEPCVMC |
| | | AGTIV |
| | | MSRIPRWYGADDPKGGCSGSLMNLLQQSNF |
| | | NHRAIVDKGVLKEACSTLLTTFFKNLRANK |
| | | KSTN |
| TadA | 1364 | MTQDELYMKEAIKEAKKAEEKGEVPIGAVL |
| polypeptide | | VINGEIIARAHNLRETEQRSIAHAEMLVID |
| sequence | | EACKALGTWRLEGATLYVTLEPCPMCAGAV |
| | | VLSRVEKWFGAFDPKGGCSGTLMNLLQEER |
| | | FNHQAEVVSGVLEEECGGMLSAFFRELRKK |
| | | KKAARKNLSE |
| TadA | 1365 | MPPAFITGVTSLSDVELDHEYWMRHALTLA |
| polypeptide | | KRAWDEREVPVGAVLVHNHRVIGEGWNRPI |
| sequence | | GRHDPTAHAEIMALRQGGLVLQNYRLLDTT |
| | | LYVTLEPCVMCAGAMVHSRIGRWFGARDAK |
| | | TGAAGSLIDVLHHPGMNHRVEIIEGVLRDE |
| | | CATLLSDFFRMRRQEIKALKKADRAEGAGP |
| | | AV |
| TadA | 1366 | MDEYWMQVAMQMAEKAEAAGEVPVGAVLVK |
| polypeptide | | DGQQIATGYNLSISQHDPTAHAEILCLRSA |
| sequence | | GKKLENYRLLDATLYITLEPCAMCAGAMVH |
| | | SRIARVVYGARDEKTGAAGTVVNLLQHPAF |
| | | NHQVEVTSGVLAEACSAQLSRFFKRRRDEK |
| | | KALKLAQRAQQGIE |
| TadA | 1367 | MDAAKVRSEFDEKMMRYALELADKAEALGE |
| polypeptide | | IPVGAVLVDDARNIIGEGWNLSIVQSDPTA |
| sequence | | HAEIIALRNGAKNIQNYRLLNSTLYVTLEP |
| | | CTMCAGAILHSRIKRLVFGASDYKTGAIGS |
| | | RFHFFDDYKMNHTLEITSGVLAEECSQKLS |
| | | TFFQKRREEKKIEKALLKSLSDK |
| TadA | 1368 | MRTDESEDQDHRMMRLALDAARAAAEAGET |
| polypeptide | | PVGAVILDPSTGEVIATAGNGPIAAHDPTA |
| sequence | | HAEIAAMRAAAAKLGNYRLTDLTLWTLEPC |
| | | AMCAGAISHARIGRVVFGADDPKGGAVVHG |
| | | PKFFAQPTCHWRPEVTGGVLADESADLLRG |
| | | FFRARRKAKI |
| TadA | 1369 | MSSLKKTPIRDDAYWMGKAIREAAKAAARD |
| polypeptide | | EVPIGAVIVRDGAVIGRGHNLREGSNDPSA |
| sequence | | HAEMIAIRQAARRSANWRLTGATLYVTLEP |
| | | CLMCMGAIILARLERVVFGCYDPKGGAAGS |
| | | LYDLSADPRLNHQVRLSPGVCQEECGTMLS |
| | | DFFRDLRRRKKAKATPALFIDERKVPPEP |
| ecTadA | 1370 | MSEVEFSHEYWMRHALTLAKRARDEREVPV |
| polypeptide | | GAVLVLNNRVIGEGWNRAIGLHDPTAHAEI |
| sequence | | MALRQGGLVMQNYRLIDATLYVTFEPCVMC |
| | | AGAMIHSRIGRVVFGVRNAKTGAAGSLMDV |
| | | LHYPGMNHRVEITEGILADECAALLCYFFR |
| | | MPRQVFNAQKKAQSSTD |
| TadA*7.10 | 8 | MSEVEFSHEYWMRHALTLAKRARDEREVPV |
| | | GAVLVLNNRVIGEGWNRAIGLHDPTAHAEI |
| | | MALRQGGLVMQNYRLIDATLYVTFEPCVMC |
| | | AGAMIHSRIGRVVFGVRNAKTGAAGSLMDV |
| | | LHYPGMNHRVEITEGILADECAALLCYFFR |
| | | MPRQVFNAQKKAQSSTD |
| TadA*8 | 12 | MSEVEFSHEYWMRHALTLAKRARDEREVPV |
| | | GAVLVLNNRVIGEGWNRAIGLHDPTAHAEI |
| | | MALRQGGLVMQNYRLIDATLYVTFEPCVMC |
| | | AGAMIHSRIGRWFGVRNAKTGAAGSLMDVL |
| | | HYPGMNHRVEITEGILADECAALLCTFFRM |
| | | PRQVFNAQKKAQSSTD |
| gRNA | 224 | GUUUUAGAGCUAGAAAUAGCAAGUUAAAAU |
| scaffold | | AAGGCUAGUCCGUUAUCAACUUGAAAAAGU |
| nucleotide | | GGCACCGAGUCGGUGCUUUU |
| sequence | | |
| gRNA | 225 | GUUUUUGUACUCUCAAGAUUUAAGUAACUG |
| scaffold | | UACAACGAAACUUACACAGUUACUUAAAUC |
| nucleotide | | UUGCAGAAGCUACAAAGAUAAGGCUUCAUG |
| sequence | | CCGAAAUCAACACCCUGUCAUUUUAUGGCA |
| | | GGGUG |
| S. pyogenes | 226 | GUUUUAGAGCUAGAAAUAGCAAGUUAAAAU |
| gRNA | | AAGGCUAGUCCGUUAUCAACUUGAAAAAGU |
| scaffold | | GGCACCGAGUCGGUGC |
| nucleotide | | |
| sequence | | |
| S. aureus | 227 | GUUUUAGUACUCUGUAAUGAAAAUUACAGA |
| gRNA | | AUCUACUAAAACAAGGCAAAAUGCCGUGUU |
| scaffold | | UAUCUCGUCAACUUGUUGGCGAGA |
| nucleotide | | |
| sequence | | |
| BhCas12b | 228 | GUUCUGUCUUUUGGUCAGGACAACCGUCUA |
| gRNA | | GCUAUAAGUGCUGCAGGGUGUGAGAAACUC |
| scaffold | | CUAUUGCUGGACGAUGUCUCUUACGAGGCA |
| nucleotide | | UUAGCAC |
| sequence | | |
| BvCas12b | 229 | GACCUAUAGGGUCAAUGAAUCUGUGCGUGU |
| gRNA | | GCCAUAAGUAAUUAAAAAUUACCCACCACA |
| scaffold | | GGAGCACCUGAAAACAGGUGCUUGGCAC |
| nucleotide | | |
| sequence | | |
| gRNA | 230 | GUUUUAGAGCUAGAAAUAGCAAGUUAAAAU |
| scaffold | | AAGGCUAGUCCGUUAUCAACUUGAAAAAGU |
| nucleotide | | GGGACCGAGUCGGUGCUUUU |
| sequence | | |
| gRNA | 3000 | GUUUUAGAGCUAGAAAUAGCAAGUUAAAAU |
| scaffold | | AAGGCUAGUCCGUUAUCAACUUGAAAAAGU |
| nucleotide | | GGCACCGAGUCGGUGCUUUU |
| sequence | | |
| BhCas12b | 243 | GUUCUGUCUUUUGGUCAGGACAACCGUCUA |
| gRNA | | GCUAUAAGUGCUGCAGGGUGUGAGAAACUC |
| scaffold + | | CUAUUGCUGGACGAUGUCUCUUACGAGGCA |
| guide | | UUAGCACNNNNNNNNNNNNNNNNNNNN |
| sequence | | |
| BvCas12b | 244 | GACCUAUAGGGUCAAUGAAUCUGUGCGUGU |
| gRNA | | GCCAUAAGUAAUUAAAAAUUACCCACCACA |
| scaffold + | | GGAGCACCUGAAAACAGGUGCUUGGCACNN |
| guide | | NNNNNNNNNNNNNNNNNN |
| sequence | | |
| AaCas12b | 245 | GUCUAAAGGACAGAAUUUUUCAACGGGUGU |
| gRNA | | GCCAAUGGCCACUUUCCAGGUGGCAAAGCC |
| scaffold + | | CGUUGAACUUCUCAAAAAGAACGAUCUGAG |
| guide | | AAGUGGCACNNNNNNNNNNNNNNNNNNNN |
| sequence | | |
| SpyMacCas9 | 1307 | MDKKYSIGLDIGTNSVGWAVITDDYKVPSK |
| polypeptide | | KFKVLGNTDRHSIKKNLIGALLFGSGETAE |
| sequence | | ATRLKRTARRRYTRRKNRICYLQEIFSNEM |
| | | AKVDDSFFHRLEESFLVEEDKKHERHPIFG |
| | | NIVDEVAYHEKYPTIYHLRKKLADSTDKAD |
| | | LRLIYLALAHMIKFRGHFLIEGDLNPDNSD |
| | | VDKLFIQLVQIYNQLFEENPINASRVDAKA |
| | | ILSARLSKSRRLENLIAQLPGEKRNGLFGN |
| | | LIALSLGLTPNFKSNFDLAEDAKLQLSKDT |
| | | YDDDLDNLLAQIGDQYADLFLAAKNLSDAI |
| | | LLSDILRVNSEITKAPLSASMIKRYDEHHQ |
| | | DLTLLKALVRQQLPEKYKEIFFDQSKNGYA |
| | | GYIDGGASQEEFYKFIKPILEKMDGTEELL |
| | | VKLNREDLLRKQRTFDNGSIPHQIHLGELH |
| | | AILRRQEDFYPFLKDNREKIEKILTFRIPY |
| | | YVGPLARGNSRFAWMTRKSEETITPWNFEE |
| | | VVDKGASAQSFIERMTNFDKNLPNEKVLPK |
| | | HSLLYEYFTVYNELTKVKYVTEGMRKPAFL |
| | | SGEQKKAIVDLLFKTNRKVTVKQLKEDYFK |
| | | KIECFDSVEISGVEDRFNASLGAYHDLLKI |
| | | IKDKDFLDNEENEDILEDIVLTLTLFEDRG |
| | | MIEERLKTYAHLFDDKVMKQLKRRRYTGWG |
| | | RLSRKLINGIRDKQSGKTILDFLKSDGFAN |
| | | RNFMQLIHDDSLTFKEDIQKAQVSGQGHSL |
| | | HEQIANLAGSPAIKKGILQTVKIVDELVKV |
| | | MGHKPENIVIEMARENQTTQKGQKNSRERM |
| | | KRIEEGIKELGSQILKEHPVENTQLQNEKL |
| | | YLYYLQNGRDMYVDQELDINRLSDYDVDHI |
| | | VPQSFIKDDSIDNKVLTRSDKNRGKSDNVP |
| | | SEEWKKMKNYWRQLLNAKLITQRKFDNLTK |
| | | AERGGLSELDKAGFIKRQLVETRQITKHVA |
| | | QILDSRMNTKYDENDKLIREVKVITLKSKL |
| | | VSDFRKDFQFYKVREINNYHHAHDAYLNAV |
| | | VGTALIKKYPKLESEFVYGDYKVYDVRKMI |
| | | AKSEQEIGKATAKYFFYSNIMNFFKTEITL |
| | | ANGEIRKRPLIETNGETGEIVWDKGRDFAT |
| | | VRKVLSMPQVNIVKKTEIQTVGQNGGLFDD |
| | | NPKSPLEVTPSKLVPLKKELNPKKYGGYQK |
| | | PTTAYPVLLITDTKQLIPISVMNKKQFEQN |
| | | PVKFLRDRGYQQVGKNDFIKLPKYTLVDIG |
| | | DGIKRLWASSKEIHKGNQLVVSKKSQILLY |
| | | HAHHLDSDLSNDYLQNHNQQFDVLFNEIIS |
| | | FSKKCKLGKEHIQKIENVYSNKKNSASIEE |
| | | LAESFIKLLGFTQLGATSPFNFLGVKLNQK |
| | | QYKGKKDYILPCTEGTLIRQSITGLYETRV |
| | | DLSKIGED |
| NLS | 83 | PKKKRKVEGADKRTADGSEFESPKKKRKV |
| NLS | 84 | KRTADGSEFESPKKKRKV |
| NLS | 85 | KRPAATKKAGQAKKKK |
| NLS | 86 | KKTELQTTNAENKTKKL |
| NLS | 87 | KRGINDRNFWRGENGRKTR |
| NLS | 1424 | RKSGKIAAIVVKRPRKPKKKRKV |
| NLS | 90 | MDSLLMNRRKFLYQFKNVRWAKGRRETYLC |
| Linker | 1425 | (SGGS)2 |
| pNMG-B335 | 1426 | MSEVEFSHEYWMRHALTLAKRARDEREVPV |
| ABE8.1_ | | GAVLVLNNRVIGEGWNRAIGLHDPTAHAEI |
| Y147T+C | | MALRQGGLVMQNYRLIDATLYVTFEPCVMC |
| P5_NGC | | AGAMIHSRIGRVVFGVRNAKTGAAGSLMDV |
| PAM_monomer | | LHYPGMNHRVEITEGILADECAALLCTFFR |
| polypeptide | | MPRQVFNAQKKAQSSTDSGGSSGGSSGSET |
| sequence | | PGTSESATPESSGGSSGGSEIGKATAKYFF |
| | | YSNIMNFFKTEITLANGEIRKRPLIETNGE |
| | | TGEIVWDKGRDFATVRKVLSMPQVNIVKKT |
| | | EVQTGGFSKESILPKRNSDKLIARKKDWDP |
| | | KKYGGFMQPTVAYSVLVVAKVEKGKSKKLK |
| | | SVKELLGITIMERSSFEKNPIDFLEAKGYK |
| | | EVKKDLIIKLPKYSLFELENGRKRMLASAK |
| | | FLQKGNELALPSKYVNFLYLASHYEKLKGS |
| | | PEDNEQKQLFVEQHKHYLDEIIEQISEFSK |
| | | RVILADANLDKVLSAYNKHRDKPIREQAEN |
| | | IIHLFTLTNLGAPRAFKYFDTTIARKEYRS |
| | | TKEVLDATLIHQSITGLYETRIDLSQLGGD |
| | | GGSGGSGGSGGSGGSGGSGGMDKKYSIGLA |
| | | IGTNSVGWAVITDEYKVPSKKFKVLGNTDR |
| | | HSIKKNLIGALLFDSGETAEATRLKRTARR |
| | | RYTRRKNRICYLQEIFSNEMAKVDDSFFHR |
| | | LEESFLVEEDKKHERHPIFGNIVDEVAYHE |
| | | KYPTIYHLRKKLVDSTDKADLRLIYLALAH |
| | | MIKFRGHFLIEGDLNPDNSDVDKLFIQLVQ |
| | | TYNQLFEENPINASGVDAKAILSARLSKSR |
| | | RLENLIAQLPGEKKNGLFGNLIALSLGLTP |
| | | NFKSNFDLAEDAKLQLSKDTYDDDLDNLLA |
| | | QIGDQYADLFLAAKNLSDAILLSDILRVNT |
| | | EITKAPLSASMIKRYDEHHQDLTLLKALVR |
| | | QQLPEKYKEIFFDQSKNGYAGYIDGGASQE |
| | | EFYKFIKPILEKMDGTEELLVKLNREDLLR |
| | | KQRTFDNGSIPHQIHLGELHAILRRQEDFY |
| | | PFLKDNREKIEKILTFRIPYYVGPLARGNS |
| | | RFAWMTRKSEETITPWNFEEVVDKGASAQS |
| | | FIERMTNFDKNLPNEKVLPKHSLLYEYFTV |
| | | YNELTKVKYVTEGMRKPAFLSGEQKKAIVD |
| | | LLFKTNRKVTVKQLKEDYFKKIECFDSVEI |
| | | SGVEDRFNASLGTYHDLLKIIKDKDFLDNE |
| | | ENEDILEDIVLTLTLFEDREMIEERLKTYA |
| | | HLFDDKVMKQLKRRRYTGWGRLSRKLINGI |
| | | RDKQSGKTILDFLKSDGFANRNFMQLIHDD |
| | | SLTFKEDIQKAQVSGQGDSLHEHIANLAGS |
| | | PAIKKGILQTVKVVDELVKVMGRHKPENIV |
| | | IEMARENQTTQKGQKNSRERMKRIEEGIKE |
| | | LGSQILKEHPVENTQLQNEKLYLYYLQNGR |
| | | DMYVDQELDINRLSDYDVDHIVPQSFLKDD |
| | | SIDNKVLTRSDKNRGKSDNVPSEEVVKKMK |
| | | NYWRQLLNAKLITQRKFDNLTKAERGGLSE |
| | | LDKAGFIKRQLVETRQITKHVAQILDSRMN |
| | | TKYDENDKLIREVKVITLKSKLVSDFRKDF |
| | | QFYKVREINNYHHAHDAYLNAWGTALIKKY |
| | | PKLESEFVYGDYKVYDVRKMIAKSEQEGAD |
| | | KRTADGSEFESPKKKRKV |
| pNMG- | 1427 | MSEVEFSHEYWMRHALTLAKRAWDEREVPV |
| 357_ | | GAVLVHNNRVIGEGWNRPIGRHDPTAHAEI |
| ABE8.14 | | MALRQGGLVMQNYRLIDATLYVTLEPCVMC |
| with | | AGAMIHSRIGRVVFGARDAKTGAAGSLMDV |
| NGC PAM | | LHHPGMNHRVEITEGILADECAALLSDFFR |
| CP5 | | MRRQEIKAQKKAQSSTDGGSSGGSSGSETP |
| polypeptide | | GTSESATPESSGGSSGGSMSEVEFSHEYWM |
| sequence | | RHALTLAKRARDEREVPVGAVLVLNNRVIG |
| | | EGWNRAIGLHDPTAHAEIMALRQGGLVMQN |
| | | YRLIDATLYVTFEPCVMCAGAMIHSRIGRW |
| | | FGVRNAKTGAAGSLMDVLHYPGMNHRVEIT |
| | | EGILADECAALLCTFFRMPRQVFNAQKKAQ |
| | | SSTDSGGSSGGSSGSETPGTSESATPESSG |
| | | GSSGGSEIGKATAKYFFYSNIMNFFKTEIT |
| | | LANGEIRKRPLIETNGETGEIVWDKGRDFA |
| | | TVRKVLSMPQVNIVKKTEVQTGGFSKESIL |
| | | PKRNSDKLIARKKDWDPKKYGGFMQPTVAY |
| | | SVLWAKVEKGKSKKLKSVKELLGITIMERS |
| | | SFEKNPIDFLEAKGYKEVKKDLIIKLPKYS |
| | | LFELENGRKRMLASAKFLQKGNELALPSKY |
| | | VNFLYLASHYEKLKGSPEDNEQKQLFVEQH |
| | | KHYLDEIIEQISEFSKRVILADANLDKVLS |
| | | AYNKHRDKPIREQAENIIHLFTLTNLGAPR |
| | | AFKYFDTTIARKEYRSTKEVLDATLIHQSI |
| | | TGLYETRIDLSQLGGDGGSGGSGGSGGSGG |
| | | SGGSGGMDKKYSIGLAIGTNSVGWAVITDE |
| | | YKVPSKKFKVLGNTDRHSIKKNLIGALLFD |
| | | SGETAEATRLKRTARRRYTRRKNRICYLQE |
| | | IFSNEMAKVDDSFFHRLEESFLVEEDKKHE |
| | | RHPIFGNIVDEVAYHEKYPTIYHLRKKLVD |
| | | STDKADLRLIYLALAHMIKFRGHFLIEGDL |
| | | NPDNSDVDKLFIQLVQTYNQLFEENPINAS |
| | | GVDAKAILSARLSKSRRLENLIAQLPGEKK |
| | | NGLFGNLIALSLGLTPNFKSNFDLAEDAKL |
| | | QLSKDTYDDDLDNLLAQIGDQYADLFLAAK |
| | | NLSDAILLSDILRVNTEITKAPLSASMIKR |
| | | YDEHHQDLTLLKALVRQQLPEKYKEIFFDQ |
| | | SKNGYAGYIDGGASQEEFYKFIKPILEKMD |
| | | GTEELLVKLNREDLLRKQRTFDNGSIPHQI |
| | | HLGELHAILRRQEDFYPFLKDNREKIEKIL |
| | | TFRIPYYVGPLARGNSRFAWMTRKSEETIT |
| | | PWNFEEVVDKGASAQSFIERMTNFDKNLPN |
| | | EKVLPKHSLLYEYFTVYNELTKVKYVTEGM |
| | | RKPAFLSGEQKKAIVDLLFKTNRKVTVKQL |
| | | KEDYFKKIECFDSVEISGVEDRFNASLGTY |
| | | HDLLKIIKDKDFLDNEENEDILEDIVLTLT |
| | | LFEDREMIEERLKTYAHLFDDKVMKQLKRR |
| | | RYTGWGRLSRKLINGIRDKQSGKTILDFLK |
| | | SDGFANRNFMQLIHDDSLTFKEDIQKAQVS |
| | | GQGDSLHEHIANLAGSPAIKKGILQTVKVV |
| | | DELVKVMGRHKPENIVIEMARENQTTQKGQ |
| | | KNSRERMKRIEEGIKELGSQILKEHPVENT |
| | | QLQNEKLYLYYLQNGRDMYVDQELDINRLS |
| | | DYDVDHIVPQSFLKDDSIDNKVLTRSDKNR |
| | | GKSDNVPSEEWKKMKNYWRQLLNAKLITQR |
| | | KFDNLTKAERGGLSELDKAGFIKRQLVETR |
| | | QITKHVAQILDSRMNTKYDENDKLIREVKV |
| | | ITLKSKLVSDFRKDFQFYKVREINNYHHAH |
| | | DAYLNAVVGTALIKKYPKLESEFVYGDYKV |
| | | YDVRKMIAKSEQEGADKRTADGSEFESPKK |
| | | KRKV |
| ABE8.8-m | 1428 | MSEVEFSHEYWMRHALTLAKRARDEREVPV |
| polypeptide | | GAVLVLNNRVIGEGWNRAIGLHDPTAHAEI |
| sequence | | MALRQGGLVMQNYRLIDATLYVTFEPCVMC |
| | | AGAMIHSRIGRVVFGVRNAKTGAAGSLMDV |
| | | LHHPGMNHRVEITEGILADECAALLCRFFR |
| | | MPRRVFNAQKKAQSSTDSGGSSGGSSGSET |
| | | PGTSESATPESSGGSSGGSDKKYSIGLAIG |
| | | TNSVGWAVITDEYKVPSKKFKVLGNTDRHS |
| | | IKKNLIGALLFDSGETAEATRLKRTARRRY |
| | | TRRKNRICYLQEIFSNEMAKVDDSFFHRLE |
| | | ESFLVEEDKKHERHPIFGNIVDEVAYHEKY |
| | | PTIYHLRKKLVDSTDKADLRLIYLALAHMI |
| | | KFRGHFLIEGDLNPDNSDVDKLFIQLVQTY |
| | | NQLFEENPINASGVDAKAILSARLSKSRRL |
| | | ENLIAQLPGEKKNGLFGNLIALSLGLTPNF |
| | | KSNFDLAEDAKLQLSKDTYDDDLDNLLAQI |
| | | GDQYADLFLAAKNLSDAILLSDILRVNTEI |
| | | TKAPLSASMIKRYDEHHQDLTLLKALVRQQ |
| | | LPEKYKEIFFDQSKNGYAGYIDGGASQEEF |
| | | YKFIKPILEKMDGTEELLVKLNREDLLRKQ |
| | | RTFDNGSIPHQIHLGELHAILRRQEDFYPF |
| | | LKDNREKIEKILTFRIPYYVGPLARGNSRF |
| | | AWMTRKSEETITPWNFEEWDKGASAQSFIE |
| | | RMTNFDKNLPNEKVLPKHSLLYEYFTVYNE |
| | | LTKVKYVTEGMRKPAFLSGEQKKAIVDLLF |
| | | KTNRKVTVKQLKEDYFKKIECFDSVEISGV |
| | | EDRFNASLGTYHDLLKIIKDKDFLDNEENE |
| | | DILEDIVLTLTLFEDREMIEERLKTYAHLF |
| | | DDKVMKQLKRRRYTGWGRLSRKLINGIRDK |
| | | QSGKTILDFLKSDGFANRNFMQLIHDDSLT |
| | | FKEDIQKAQVSGQGDSLHEHIANLAGSPAI |
| | | KKGILQTVKVVDELVKVMGRHKPENIVIEM |
| | | ARENQTTQKGQKNSRERMKRIEEGIKELGS |
| | | QILKEHPVENTQLQNEKLYLYYLQNGRDMY |
| | | VDQELDINRLSDYDVDHIVPQSFLKDDSID |
| | | NKVLTRSDKNRGKSDNVPSEEVVKKMKNYW |
| | | RQLLNAKLITQRKFDNLTKAERGGLSELDK |
| | | AGFIKRQLVETRQITKHVAQILDSRMNTKY |
| | | DENDKLIREVKVITLKSKLVSDFRKDFQFY |
| | | KVREINNYHHAHDAYLNAVVGTALIKKYPK |
| | | LESEFVYGDYKVYDVRKMIAKSEQEIGKAT |
| | | AKYFFYSNIMNFFKTEITLANGEIRKRPLI |
| | | ETNGETGEIVWDKGRDFATVRKVLSMPQVN |
| | | IVKKTEVQTGGFSKESILPKRNSDKLIARK |
| | | KDWDPKKYGGFDSPTVAYSVLVVAKVEKGK |
| | | SKKLKSVKELLGITIMERSSFEKNPIDFLE |
| | | AKGYKEVKKDLIIKLPKYSLFELENGRKRM |
| | | LASAGELQKGNELALPSKYVNFLYLASHYE |
| | | KLKGSPEDNEQKQLFVEQHKHYLDEIIEQI |
| | | SEFSKRVILADANLDKVLSAYNKHRDKPIR |
| | | EQAENIIHLFTLTNLGAPAAFKYFDTTIDR |
| | | KRYTSTKEVLDATLIHQSITGLYETRIDLS |
| | | QLGGDEGADKRTADGSEFESPKKKRKV |
| ABE8.8-d | 1429 | MSEVEFSHEYWMRHALTLAKRAWDEREVPV |
| polypeptide | | GAVLVHNNRVIGEGWNRPIGRHDPTAHAEI |
| sequence | | MALRQGGLVMQNYRLIDATLYVTLEPCVMC |
| | | AGAMIHSRIGRVVFGARDAKTGAAGSLMDV |
| | | LHHPGMNHRVEITEGILADECAALLSDFFR |
| | | MRRQEIKAQKKAQSSTDSGGSSGGSSGSET |
| | | PGTSESATPESSGGSSGGSSEVEFSHEYWM |
| | | RHALTLAKRARDEREVPVGAVLVLNNRVIG |
| | | EGWNRAIGLHDPTAHAEIMALRQGGLVMQN |
| | | YRLIDATLYVTFEPCVMCAGAMIHSRIGRW |
| | | FGVRNAKTGAAGSLMDVLHHPGMNHRVEIT |
| | | EGILADECAALLCRFFRMPRRVFNAQKKAQ |
| | | SSTDSGGSSGGSSGSETPGTSESATPESSG |
| | | GSSGGSDKKYSIGLAIGTNSVGWAVITDEY |
| | | KVPSKKFKVLGNTDRHSIKKNLIGALLFDS |
| | | GETAEATRLKRTARRRYTRRKNRICYLQEI |
| | | FSNEMAKVDDSFFHRLEESFLVEEDKKHER |
| | | HPIFGNIVDEVAYHEKYPTIYHLRKKLVDS |
| | | TDKADLRLIYLALAHMIKFRGHFLIEGDLN |
| | | PDNSDVDKLFIQLVQTYNQLFEENPINASG |
| | | VDAKAILSARLSKSRRLENLIAQLPGEKKN |
| | | GLFGNLIALSLGLTPNFKSNFDLAEDAKLQ |
| | | LSKDTYDDDLDNLLAQIGDQYADLFLAAKN |
| | | LSDAILLSDILRVNTEITKAPLSASMIKRY |
| | | DEHHQDLTLLKALVRQQLPEKYKEIFFDQS |
| | | KNGYAGYIDGGASQEEFYKFIKPILEKMDG |
| | | TEELLVKLNREDLLRKQRTFDNGSIPHQIH |
| | | LGELHAILRRQEDFYPFLKDNREKIEKILT |
| | | FRIPYYVGPLARGNSRFAWMTRKSEETITP |
| | | WNFEEWDKGASAQSFIERMTNFDKNLPNEK |
| | | VLPKHSLLYEYFTVYNELTKVKYVTEGMRK |
| | | PAFLSGEQKKAIVDLLFKTNRKVTVKQLKE |
| | | DYFKKIECFDSVEISGVEDRFNASLGTYHD |
| | | LLKIIKDKDFLDNEENEDILEDIVLTLTLF |
| | | EDREMIEERLKTYAHLFDDKVMKQLKRRRY |
| | | TGWGRLSRKLINGIRDKQSGKTILDFLKSD |
| | | GFANRNFMQLIHDDSLTFKEDIQKAQVSGQ |
| | | GDSLHEHIANLAGSPAIKKGILQTVKWDEL |
| | | VKVMGRHKPENIVIEMARENQTTQKGQKNS |
| | | RERMKRIEEGIKELGSQILKEHPVENTQLQ |
| | | NEKLYLYYLQNGRDMYVD |
| | | QELDINRLSDYDVDHIVPQSFLKDDSIDNK |
| | | VLTRSDKNRGKSDNVPSEEWKKMKNYWRQL |
| | | LNAKLITQRKFDNLTKAERGGLSELDKAGF |
| | | IKRQLVETRQITKHVAQILDSRMNTKYDEN |
| | | DKLIREVKVITLKSKLVSDFRKDFQFYKVR |
| | | EINNYHHAHDAYLNAWGTALIKKYPKLESE |
| | | FVYGDYKVYDVRKMIAKSEQEIGKATAKYF |
| | | FYSNIMNFFKTEITLANGEIRKRPLIETNG |
| | | ETGEIVWDKGRDFATVRKVLSMPQVNIVKK |
| | | TEVQTGGFSKESILPKRNSDKLIARKKDWD |
| | | PKKYGGFDSPTVAYSVLVVAKVEKGKSKKL |
| | | KSVKELLGITIMERSSFEKNPIDFLEAKGY |
| | | KEVKKDLIIKLPKYSLFELENGRKRMLASA |
| | | GELQKGNELALPSKYVNFLYLASHYEKLKG |
| | | SPEDNEQKQLFVEQHKHYLDEIIEQISEFS |
| | | KRVILADANLDKVLSAYNKHRDKPIREQAE |
| | | NIIHLFTLTNLGAPAAFKYFDTTIDRKRYT |
| | | STKEVLDATLIHQSITGLYETRIDLSQLGG |
| | | DEGADKRTADGSEFESPKKKRKV |
| ABE8.13-m | 1430 | MSEVEFSHEYWMRHALTLAKRARDEREVPV |
| polypeptide | | GAVLVLNNRVIGEGWNRAIGLHDPTAHAEI |
| sequence | | MALRQGGLVMQNYRLYDATLYVTFEPCVMC |
| | | AGAMIHSRIGRVVFGVRNAKTGAAGSLMDV |
| | | LHHPGMNHRVEITEGILADECAALLCRFFR |
| | | MPRRVFNAQKKAQSSTDSGGSSGGSSGSET |
| | | PGTSESATPESSGGSSGGSDKKYSIGLAIG |
| | | TNSVGWAVITDEYKVPSKKFKVLGNTDRHS |
| | | IKKNLIGALLFDSGETAEATRLKRTARRRY |
| | | TRRKNRICYLQEIFSNEMAKVDDSFFHRLE |
| | | ESFLVEEDKKHERHPIFGNIVDEVAYHEKY |
| | | PTIYHLRKKLVDSTDKADLRLIYLALAHMI |
| | | KFRGHFLIEGDLNPDNSDVDKLFIQLVQTY |
| | | NQLFEENPINASGVDAKAILSARLSKSRRL |
| | | ENLIAQLPGEKKNGLFGNLIALSLGLTPNF |
| | | KSNFDLAEDAKLQLSKDTYDDDLDNLLAQI |
| | | GDQYADLFLAAKNLSDAILLSDILRVNTEI |
| | | TKAPLSASMIKRYDEHHQDLTLLKALVRQQ |
| | | LPEKYKEIFFDQSKNGYAGYIDGGASQEEF |
| | | YKFIKPILEKMDGTEELLVKLNREDLLRKQ |
| | | RTFDNGSIPHQIHLGELHAILRRQEDFYPF |
| | | LKDNREKIEKILTFRIPYYVGPLARGNSRF |
| | | AWMTRKSEETITPWNFEEWDKGASAQSFIE |
| | | RMTNFDKNLPNEKVLPKHSLLYEYFTVYNE |
| | | LTKVKYVTEGMRKPAFLSGEQKKAIVDLLF |
| | | KTNRKVTVKQLKEDYFKKIECFDSVEISGV |
| | | EDRFNASLGTYHDLLKIIKDKDFLDNEENE |
| | | DILEDIVLTLTLFEDREMIEERLKTYAHLF |
| | | DDKVMKQLKRRRYTGWGRLSRKLINGIRDK |
| | | QSGKTILDFLKSDGFANRNFMQLIHDDSLT |
| | | FKEDIQKAQVSGQGDSLHEHIANLAGSPAI |
| | | KKGILQTVKVVDELVKVMGRHKPENIVIEM |
| | | ARENQTTQKGQKNSRERMKRIEEGIKELGS |
| | | QILKEHPVENTQLQNEKLYLYYLQNGRDMY |
| | | VDQELDINRLSDYDVDHIVPQSFLKDDSID |
| | | NKVLTRSDKNRGKSDNVPSEEVVKKMKNYW |
| | | RQLLNAKLITQRKFDNLTKAERGGLSELDK |
| | | AGFIKRQLVETRQITKHVAQILDSRMNTKY |
| | | DENDKLIREVKVITLKSKLVSDFRKDFQFY |
| | | KVREINNYHHAHDAYLNAVVGTALIKKYPK |
| | | LESEFVYGDYKVYDVRKMIAKSEQEIGKAT |
| | | AKYFFYSNIMNFFKTEITLANGEIRKRPLI |
| | | ETNGETGEIVWDKGRDFATVRKVLSMPQVN |
| | | IVKKTEVQTGGFSKESILPKRNSDKLIARK |
| | | KDWDPKKYGGFDSPTVAYSVLWAKVEKGKS |
| | | KKLKSVKELLGITIMERSSFEKNPIDFLEA |
| | | KGYKEVKKDLIIKLPKYSLFELENGRKRML |
| | | ASAGELQKGNELALPSKYVNFLYLASHYEK |
| | | LKGSPEDNEQKQLFVEQHKHYLDEIIEQIS |
| | | EFSKRVILADANLDKVLSAYNKHRDKPIRE |
| | | QAENIIHLFTLTNLGAPAAFKYFDTTIDRK |
| | | RYTSTKEVLDATLIHQSITGLYETRIDLSQ |
| | | LGGDEGADKRTADGSEFESPKKKRKV |
| ABE8.13-d | 1431 | MSEVEFSHEYWMRHALTLAKRAWDEREVPV |
| polypeptide | | GAVLVHNNRVIGEGWNRPIGRHDPTAHAEI |
| sequence | | MALRQGGLVMQNYRLIDATLYVTLEPCVMC |
| | | AGAMIHSRIGRVVFGARDAKTGAAGSLMDV |
| | | LHHPGMNHRVEITEGILADECAALLSDFFR |
| | | MRRQEIKAQKKAQSSTDSGGSSGGSSGSET |
| | | PGTSESATPESSGGSSGGSSEVEFSHEYWM |
| | | RHALTLAKRARDEREVPVGAVLVLNNRVIG |
| | | EGWNRAIGLHDPTAHAEIMALRQGGLVMQN |
| | | YRLYDATLYVTFEPCVMCAGAMIHSRIGRV |
| | | VFGVRNAKTGAAGSLMDVLHHPGMNHRVEI |
| | | TEGILADECAALLCRFFRMPRRVFNAQKKA |
| | | QSSTDSGGSSGGSSGSETPGTSESATPESS |
| | | GGSSGGSDKKYSIGLAIGTNSVGWAVITDE |
| | | YKVPSKKFKVLGNTDRHSIKKNLIGALLFD |
| | | SGETAEATRLKRTARRRYTRRKNRICYLQE |
| | | IFSNEMAKVDDSFFHRLEESFLVEEDKKHE |
| | | RHPIFGNIVDEVAYHEKYPTIYHLRKKLVD |
| | | STDKADLRLIYLALAHMIKFRGHFLIEGDL |
| | | NPDNSDVDKLFIQLVQTYNQLFEENPINAS |
| | | GVDAKAILSARLSKSRRLENLIAQLPGEKK |
| | | NGLFGNLIALSLGLTPNFKSNFDLAEDAKL |
| | | QLSKDTYDDDLDNLLAQIGDQYADLFLAAK |
| | | NLSDAILLSDILRVNTEITKAPLSASMIKR |
| | | YDEHHQDLTLLKALVRQQLPEKYKEIFFDQ |
| | | SKNGYAGYIDGGASQEEFYKFIKPILEKMD |
| | | GTEELLVKLNREDLLRKQRTFDNGSIPHQI |
| | | HLGELHAILRRQEDFYPFLKDNREKIEKIL |
| | | TFRIPYYVGPLARGNSRFAWMTRKSEETIT |
| | | PWNFEEWDKGASAQSFIERMTNFDKNLPNE |
| | | KVLPKHSLLYEYFTVYNELTKVKYVTEGMR |
| | | KPAFLSGEQKKAIVDLLFKTNRKVTVKQLK |
| | | EDYFKKIECFDSVEISGVEDRFNASLGTYH |
| | | DLLKIIKDKDFLDNEENEDILEDIVLTLTL |
| | | FEDREMIEERLKTYAHLFDDKVMKQLKRRR |
| | | YTGWGRLSRKLINGIRDKQSGKTILDFLKS |
| | | DGFANRNFMQLIHDDSLTFKEDIQKAQVSG |
| | | QGDSLHEHIANLAGSPAIKKGILQTVKVVD |
| | | ELVKVMGRHKPENIVIEMARENQTTQKGQK |
| | | NSRERMKRIEEGIKELGSQILKEHPVENTQ |
| | | LQNEKLYLYYLQNGRDMYVDQELDINRLSD |
| | | YDVDHIVPQSFLKDDSIDNKVLTRSDKNRG |
| | | KSDNVPSEEWKKMKNYWRQLLNAKLITQRK |
| | | FDNLTKAERGGLSELDKAGFIKRQLVETRQ |
| | | ITKHVAQILDSRMNTKYDENDKLIREVKVI |
| | | TLKSKLVSDFRKDFQFYKVREINNYHHAHD |
| | | AYLNAWGTALIKKYPKLESEFVYGDYKVYD |
| | | VRKMIAKSEQEIGKATAKYFFYSNIMNFFK |
| | | TEITLANGEIRKRPLIETNGETGEIVWDKG |
| | | RDFATVRKVLSMPQVNIVKKTEVQTGGFSK |
| | | ESILPKRNSDKLIARKKDWDPKKYGGFDSP |
| | | TVAYSVLVVAKVEKGKSKKLKSVKELLGIT |
| | | IMERSSFEKNPIDFLEAKGYKEVKKDLIIK |
| | | LPKYSLFELENGRKRMLASAGELQKGNELA |
| | | LPSKYVNFLYLASHYEKLKGSPEDNEQKQL |
| | | FVEQHKHYLDEIIEQISEFSKRVILADANL |
| | | DKVLSAYNKHRDKPIREQAENIIHLFTLTN |
| | | LGAPAAFKYFDTTIDRKRYTSTKEVLDATL |
| | | IHQSITGLYETRIDLSQLGGDEGADKRTAD |
| | | GSEFESPKKKRKV |
| ABE8.17-m | 1432 | MSEVEFSHEYWMRHALTLAKRARDEREVPV |
| polypeptide | | GAVLVLNNRVIGEGWNRAIGLHDPTAHAEI |
| sequence | | MALRQGGLVMQNYRLIDATLYSTFEPCVMC |
| | | AGAMIHSRIGRVVFGVRNAKTGAAGSLMDV |
| | | LHYPGMNHRVEITEGILADECAALLCYFFR |
| | | MPRRVFNAQKKAQSSTDSGGSSGGSSGSET |
| | | PGTSESATPESSGGSSGGSDKKYSIGLAIG |
| | | TNSVGWAVITDEYKVPSKKFKVLGNTDRHS |
| | | IKKNLIGALLFDSGETAEATRLKRTARRRY |
| | | TRRKNRICYLQEIFSNEMAKVDDSFFHRLE |
| | | ESFLVEEDKKHERHPIFGNIVDEVAYHEKY |
| | | PTIYHLRKKLVDSTDKADLRLIYLALAHMI |
| | | KFRGHFLIEGDLNPDNSDVDKLFIQLVQTY |
| | | NQLFEENPINASGVDAKAILSARLSKSRRL |
| | | ENLIAQLPGEKKNGLFGNLIALSLGLTPNF |
| | | KSNFDLAEDAKLQLSKDTYDDDLDNLLAQI |
| | | GDQYADLFLAAKNLSDAILLSDILRVNTEI |
| | | TKAPLSASMIKRYDEHHQDLTLLKALVRQQ |
| | | LPEKYKEIFFDQSKNGYAGYIDGGASQEEF |
| | | YKFIKPILEKMDGTEELLVKLNREDLLRKQ |
| | | RTFDNGSIPHQIHLGELHAILRRQEDFYPF |
| | | LKDNREKIEKILTFRIPYYVGPLARGNSRF |
| | | AWMTRKSEETITPWNFEEWDKGASAQSFIE |
| | | RMTNFDKNLPNEKVLPKHSLLYEYFTVYNE |
| | | LTKVKYVTEGMRKPAFLSGEQKKAIVDLLF |
| | | KTNRKVTVKQLKEDYFKKIECFDSVEISGV |
| | | EDRFNASLGTYHDLLKIIKDKDFLDNEENE |
| | | DILEDIVLTLTLFEDREMIEERLKTYAHLF |
| | | DDKVMKQLKRRRYTGWGRLSRKLINGIRDK |
| | | QSGKTILDFLKSDGFANRNFMQLIHDDSLT |
| | | FKEDIQKAQVSGQGDSLHEHIANLAGSPAI |
| | | KKGILQTVKVVDELVKVMGRHKPENIVIEM |
| | | ARENQTTQKGQKNSRERMKRIEEGIKELGS |
| | | QILKEHPVENTQLQNEKLYLYYLQNGRDMY |
| | | VDQELDINRLSDYDVDHIVPQSFLKDDSID |
| | | NKVLTRSDKNRGKSDNVPSEEVVKKMKNYW |
| | | RQLLNAKLITQRKFDNLTKAERGGLSELDK |
| | | AGFIKRQLVETRQITKHVAQILDSRMNTKY |
| | | DENDKLIREVKVITLKSKLVSDFRKDFQFY |
| | | KVREINNYHHAHDAYLNAVVGTALIKKYPK |
| | | LESEFVYGDYKVYDVRKMIAKSEQEIGKAT |
| | | AKYFFYSNIMNFFKTEITLANGEIRKRPLI |
| | | ETNGETGEIVWDKGRDFATVRKVLSMPQVN |
| | | IVKKTEVQTGGFSKESILPKRNSDKLIARK |
| | | KDWDPKKYGGFDSPTVAYSVLVVAKVEKGK |
| | | SKKLKSVKELLGITIMERSSFEKNPIDFLE |
| | | AKGYKEVKKDLIIKLPKYSLFELENGRKRM |
| | | LASAGELQKGNELALPSKYVNFLYLASHYE |
| | | KLKGSPEDNEQKQLFVEQHKHYLDEIIEQI |
| | | SEFSKRVILADANLDKVLSAYNKHRDKPIR |
| | | EQAENIIHLFTLTNLGAPAAFKYFDTTIDR |
| | | KRYTSTKEVLDATLIHQSITGLYETRIDLS |
| | | QLGGDEGADKRTADGSEFESPKKKRKV |
| ABE8.17-d | 1433 | MSEVEFSHEYWMRHALTLAKRAWDEREVPV |
| polypeptide | | GAVLVHNNRVIGEGWNRPIGRHDPTAHAEI |
| sequence | | MALRQGGLVMQNYRLIDATLYVTLEPCVMC |
| | | AGAMIHSRIGRVVFGARDAKTGAAGSLMDV |
| | | LHHPGMNHRVEITEGILADECAALLSDFFR |
| | | MRRQEIKAQKKAQSSTDSGGSSGGSSGSET |
| | | PGTSESATPESSGGSSGGSSEVEFSHEYWM |
| | | RHALTLAKRARDEREVPVGAVLVLNNRVIG |
| | | EGWNRAIGLHDPTAHAEIMALRQGGLVMQN |
| | | YRLIDATLYSTFEPCVMCAGAMIHSRIGRW |
| | | FGVRNAKTGAAGSLMDVLHYPGMNHRVEIT |
| | | EGILADECAALLCYFFRMPRRVFNAQKKAQ |
| | | SSTDSGGSSGGSSGSETPGTSESATPESSG |
| | | GSSGGSDKKYSIGLAIGTNSVGWAVITDEY |
| | | KVPSKKFKVLGNTDRHSIKKNLIGALLFDS |
| | | GETAEATRLKRTARRRYTRRKNRICYLQEI |
| | | FSNEMAKVDDSFFHRLEESFLVEEDKKHER |
| | | HPIFGNIVDEVAYHEKYPTIYHLRKKLVDS |
| | | TDKADLRLIYLALAHMIKFRGHFLIEGDLN |
| | | PDNSDVDKLFIQLVQTYNQLFEENPINASG |
| | | VDAKAILSARLSKSRRLENLIAQLPGEKKN |
| | | GLFGNLIALSLGLTPNFKSNFDLAEDAKLQ |
| | | LSKDTYDDDLDNLLAQIGDQYADLFLAAKN |
| | | LSDAILLSDILRVNTEITKAPLSASMIKRY |
| | | DEHHQDLTLLKALVRQQLPEKYKEIFFDQS |
| | | KNGYAGYIDGGASQEEFYKFIKPILEKMDG |
| | | TEELLVKLNREDLLRKQRTFDNGSIPHQIH |
| | | LGELHAILRRQEDFYPFLKDNREKIEKILT |
| | | FRIPYYVGPLARGNSRFAWMTRKSEETITP |
| | | WNFEEWDKGASAQSFIERMTNFDKNLPNEK |
| | | VLPKHSLLYEYFTVYNELTKVKYVTEGMRK |
| | | PAFLSGEQKKAIVDLLFKTNRKVTVKQLKE |
| | | DYFKKIECFDSVEISGVEDRFNASLGTYHD |
| | | LLKIIKDKDFLDNEENEDILEDIVLTLTLF |
| | | EDREMIEERLKTYAHLFDDKVMKQLKRRRY |
| | | TGWGRLSRKLINGIRDKQSGKTILDFLKSD |
| | | GFANRNFMQLIHDDSLTFKEDIQKAQVSGQ |
| | | GDSLHEHIANLAGSPAIKKGILQTVKVVDE |
| | | LVKVMGRHKPENIVIEMARENQTTQKGQKN |
| | | SRERMKRIEEGIKELGSQILKEHPVENTQL |
| | | QNEKLYLYYLQNGRDMYVDQELDINRLSDY |
| | | DVDHIVPQSFLKDDSIDNKVLTRSDKNRGK |
| | | SDNVPSEEWKKMKNYWRQLLNAKLITQRKF |
| | | DNLTKAERGGLSELDKAGFIKRQLVETRQI |
| | | TKHVAQILDSRMNTKYDENDKLIREVKVIT |
| | | LKSKLVSDFRKDFQFYKVREINNYHHAHDA |
| | | YLNAVVGTALIKKYPKLESEFVYGDYKVYD |
| | | VRKMIAKSEQEIGKATAKYFFYSNIMNFFK |
| | | TEITLANGEIRKRPLIETNGETGEIVWDKG |
| | | RDFATVRKVLSMPQVNIVKKTEVQTGGFSK |
| | | ESILPKRNSDKLIARKKDWDPKKYGGFDSP |
| | | TVAYSVLVVAKVEKGKSKKLKSVKELLGIT |
| | | IMERSSFEKNPIDFLEAKGYKEVKKDLIIK |
| | | LPKYSLFELENGRKRMLASAGELQKGNELA |
| | | LPSKYVNFLYLASHYEKLKGSPEDNEQKQL |
| | | FVEQHKHYLDEIIEQISEFSKRVILADANL |
| | | DKVLSAYNKHRDKPIREQAENIIHLFTLTN |
| | | LGAPAAFKYFDTTIDRKRYTSTKEVLDATL |
| | | IHQSITGLYETRIDLSQLGGDEGADKRTAD |
| | | GSEFESPKKKRKV |
| ABE8.20-m | 1434 | MSEVEFSHEYWMRHALTLAKRARDEREVPV |
| polypeptide | | GAVLVLNNRVIGEGWNRAIGLHDPTAHAEI |
| sequence | | MALRQGGLVMQNYRLYDATLYSTFEPCVMC |
| | | AGAMIHSRIGRWFGVRNAKTGAAGSLMDVL |
| | | HHPGMNHRVEITEGILADECAALLCRFFRM |
| | | PRRVFNAQKKAQSSTDSGGSSGGSSGSETP |
| | | GTSESATPESSGGSSGGSDKKYSIGLAIGT |
| | | NSVGWAVITDEYKVPSKKFKVLGNTDRHSI |
| | | KKNLIGALLFDSGETAEATRLKRTARRRYT |
| | | RRKNRICYLQEIFSNEMAKVDDSFFHRLEE |
| | | SFLVEEDKKHERHPIFGNIVDEVAYHEKYP |
| | | TIYHLRKKLVDSTDKADLRLIYLALAHMIK |
| | | FRGHFLIEGDLNPDNSDVDKLFIQLVQTYN |
| | | QLFEENPINASGVDAKAILSARLSKSRRLE |
| | | NLIAQLPGEKKNGLFGNLIALSLGLTPNFK |
| | | SNFDLAEDAKLQLSKDTYDDDLDNLLAQIG |
| | | DQYADLFLAAKNLSDAILLSDILRVNTEIT |
| | | KAPLSASMIKRYDEHHQDLTLLKALVRQQL |
| | | PEKYKEIFFDQSKNGYAGYIDGGASQEEFY |
| | | KFIKPILEKMDGTEELLVKLNREDLLRKQR |
| | | TFDNGSIPHQIHLGELHAILRRQEDFYPFL |
| | | KDNREKIEKILTFRIPYYVGPLARGNSRFA |
| | | WMTRKSEETITPWNFEEWDKGASAQSFIER |
| | | MTNFDKNLPNEKVLPKHSLLYEYFTVYNEL |
| | | TKVKYVTEGMRKPAFLSGEQKKAIVDLLFK |
| | | TNRKVTVKQLKEDYFKKIECFDSVEISGVE |
| | | DRFNASLGTYHDLLKIIKDKDFLDNEENED |
| | | ILEDIVLTLTLFEDREMIEERLKTYAHLFD |
| | | DKVMKQLKRRRYTGWGRLSRKLINGIRDKQ |
| | | SGKTILDFLKSDGFANRNFMQLIHDDSLTF |
| | | KEDIQKAQVSGQGDSLHEHIANLAGSPAIK |
| | | KGILQTVKVVDELVKVMGRHKPENIVIEMA |
| | | RENQTTQKGQKNSRERMKRIEEGIKELGSQ |
| | | ILKEHPVENTQLQNEKLYLYYLQNGRDMYV |
| | | DQELDINRLSDYDVDHIVPQSFLKDDSIDN |
| | | KVLTRSDKNRGKSDNVPSEEVVKKMKNYWR |
| | | QLLNAKLITQRKFDNLTKAERGGLSELDKA |
| | | GFIKRQLVETRQITKHVAQILDSRMNTKYD |
| | | ENDKLIREVKVITLKSKLVSDFRKDFQFYK |
| | | VREINNYHHAHDAYLNAVVGTALIKKYPKL |
| | | ESEFVYGDYKVYDVRKMIAKSEQEIGKATA |
| | | KYFFYSNIMNFFKTEITLANGEIRKRPLIE |
| | | TNGETGEIVWDKGRDFATVRKVLSMPQVNI |
| | | VKKTEVQTGGFSKESILPKRNSDKLIARKK |
| | | DWDPKKYGGFDSPTVAYSVLVVAKVEKGKS |
| | | KKLKSVKELLGITIMERSSFEKNPIDFLEA |
| | | KGYKEVKKDLIIKLPKYSLFELENGRKRML |
| | | ASAGELQKGNELALPSKYVNFLYLASHYEK |
| | | LKGSPEDNEQKQLFVEQHKHYLDEIIEQIS |
| | | EFSKRVILADANLDKVLSAYNKHRDKPIRE |
| | | QAENIIHLFTLTNLGAPAAFKYFDTTIDRK |
| | | RYTSTKEVLDATLIHQSITGLYETRIDLSQ |
| | | LGGDEGADKRTADGSEFESPKKKRKV |
| ABE8.20-d | 1435 | MSEVEFSHEYWMRHALTLAKRAWDEREVPV |
| polypeptide | | GAVLVHNNRVIGEGWNRPIGRHDPTAHAEI |
| sequence | | MALRQGGLVMQNYRLIDATLYVTLEPCVMC |
| | | AGAMIHSRIGRVVFGARDAKTGAAGSLMDV |
| | | LHHPGMNHRVEITEGILADECAALLSDFFR |
| | | MRRQEIKAQKKAQSSTDSGGSSGGSSGSET |
| | | PGTSESATPESSGGSSGGSSEVEFSHEYWM |
| | | RHALTLAKRARDEREVPVGAVLVLNNRVIG |
| | | EGWNRAIGLHDPTAHAEIMALRQGGLVMQN |
| | | YRLYDATLYSTFEPCVMCAGAMIHSRIGRV |
| | | VFGVRNAKTGAAGSLMDVLHHPGMNHRVEI |
| | | TEGILADECAALLCRFFRMPRRVFNAQKKA |
| | | QSSTDSGGSSGGSSGSETPGTSESATPESS |
| | | GGSSGGSDKKYSIGLAIGTNSVGWAVITDE |
| | | YKVPSKKFKVLGNTDRHSIKKNLIGALLFD |
| | | SGETAEATRLKRTARRRYTRRKNRICYLQE |
| | | IFSNEMAKVDDSFFHRLEESFLVEEDKKHE |
| | | RHPIFGNIVDEVAYHEKYPTIYHLRKKLVD |
| | | STDKADLRLIYLALAHMIKFRGHFLIEGDL |
| | | NPDNSDVDKLFIQLVQTYNQLFEENPINAS |
| | | GVDAKAILSARLSKSRRLENLIAQLPGEKK |
| | | NGLFGNLIALSLGLTPNFKSNFDLAEDAKL |
| | | QLSKDTYDDDLDNLLAQIGDQYADLFLAAK |
| | | NLSDAILLSDILRVNTEITKAPLSASMIKR |
| | | YDEHHQDLTLLKALVRQQLPEKYKEIFFDQ |
| | | SKNGYAGYIDGGASQEEFYKFIKPILEKMD |
| | | GTEELLVKLNREDLLRKQRTFDNGSIPHQI |
| | | HLGELHAILRRQEDFYPFLKDNREKIEKIL |
| | | TFRIPYYVGPLARGNSRFAWMTRKSEETIT |
| | | PWNFEEWDKGASAQSFIERMTNFDKNLPNE |
| | | KVLPKHSLLYEYFTVYNELTKVKYVTEGMR |
| | | KPAFLSGEQKKAIVDLLFKTNRKVTVKQLK |
| | | EDYFKKIECFDSVEISGVEDRFNASLGTYH |
| | | DLLKIIKDKDFLDNEENEDILEDIVLTLTL |
| | | FEDREMIEERLKTYAHLFDDKVMKQLKRRR |
| | | YTGWGRLSRKLINGIRDKQSGKTILDFLKS |
| | | DGFANRNFMQLIHDDSLTFKEDIQKAQVSG |
| | | QGDSLHEHIANLAGSPAIKKGILQTVKWDE |
| | | LVKVMGRHKPENIVIEMARENQTTQKGQKN |
| | | SRERMKRIEEGIKELGSQILKEHPVENTQL |
| | | QNEKLYLYYLQNGRDMYVDQELDINRLSDY |
| | | DVDHIVPQSFLKDDSIDNKVLTRSDKNRGK |
| | | SDNVPSEEWKKMKNYWRQLLNAKLITQRKF |
| | | DNLTKAERGGLSELDKAGFIKRQLVETRQI |
| | | TKHVAQILDSRMNTKYDENDKLIREVKVIT |
| | | LKSKLVSDFRKDFQFYKVREINNYHHAHDA |
| | | YLNAWGTALIKKYPKLESEFVYGDYKVYDV |
| | | RKMIAKSEQEIGKATAKYFFYSNIMNFFKT |
| | | EITLANGEIRKRPLIETNGETGEIVWDKGR |
| | | DFATVRKVLSMPQVNIVKKTEVQTGGFSKE |
| | | SILPKRNSDKLIARKKDWDPKKYGGFDSPT |
| | | VAYSVLVVAKVEKGKSKKLKSVKELLGITI |
| | | MERSSFEKNPIDFLEAKGYKEVKKDLIIKL |
| | | PKYSLFELENGRKRMLASAGELQKGNELAL |
| | | PSKYVNFLYLASHYEKLKGSPEDNEQKQLF |
| | | VEQHKHYLDEIIEQISEFSKRVILADANLD |
| | | KVLSAYNKHRDKPIREQAENIIHLFTLTNL |
| | | GAPAAFKYFDTTIDRKRYTSTKEVLDATLI |
| | | HQSITGLYETRIDLSQLGGDEGADKRTADG |
| | | SEFESPKKKRKV |
| 01. | 1436 | MSEVEFSHEYWMRHALTLAKRARDEREVPV |
| monoABE8.1_ | | GAVLVLNNRVIGEGWNRAIGLHDPTAHAEI |
| bpN | | MALRQGGLVMQNYRLIDATLYVTFEPCVMC |
| LS + | | AGAMIHSRIGRVVFGVRNAKTGAAGSLMDV |
| Y147T | | LHYPGMNHRVEITEGILADECAALLCTFFR |
| polypeptide | | MPRQVFNAQKKAQSSTDSGGSSGGSSGSET |
| sequence | | PGTSESATPESSGGSSGGSDKKYSIGLAIG |
| | | TNSVGWAVITDEYKVPSKKFKVLGNTDRHS |
| | | IKKNLIGALLFDSGETAEATRLKRTARRRY |
| | | TRRKNRICYLQEIFSNEMAKVDDSFFHRLE |
| | | ESFLVEEDKKHERHPIFGNIVDEVAYHEKY |
| | | PTIYHLRKKLVDSTDKADLRLIYLALAHMI |
| | | KFRGHFLIEGDLNPDNSDVDKLFIQLVQTY |
| | | NQLFEENPINASGVDAKAILSARLSKSRRL |
| | | ENLIAQLPGEKKNGLFGNLIALSLGLTPNF |
| | | KSNFDLAEDAKLQLSKDTYDDDLDNLLAQI |
| | | GDQYADLFLAAKNLSDAILLSDILRVNTEI |
| | | TKAPLSASMIKRYDEHHQDLTLLKALVRQQ |
| | | LPEKYKEIFFDQSKNGYAGYIDGGASQEEF |
| | | YKFIKPILEKMDGTEELLVKLNREDLLRKQ |
| | | RTFDNGSIPHQIHLGELHAILRRQEDFYPF |
| | | LKDNREKIEKILTFRIPYYVGPLARGNSRF |
| | | AWMTRKSEETITPWNFEEWDKGASAQSFIE |
| | | RMTNFDKNLPNEKVLPKHSLLYEYFTVYNE |
| | | LTKVKYVTEGMRKPAFLSGEQKKAIVDLLF |
| | | KTNRKVTVKQLKEDYFKKIECFDSVEISGV |
| | | EDRFNASLGTYHDLLKIIKDKDFLDNEENE |
| | | DILEDIVLTLTLFEDREMIEERLKTYAHLF |
| | | DDKVMKQLKRRRYTGWGRLSRKLINGIRDK |
| | | QSGKTILDFLKSDGFANRNFMQLIHDDSLT |
| | | FKEDIQKAQVSGQGDSLHEHIANLAGSPAI |
| | | KKGILQTVKVVDELVKVMGRHKPENIVIEM |
| | | ARENQTTQKGQKNSRERMKRIEEGIKELGS |
| | | QILKEHPVENTQLQNEKLYLYYLQNGRDMY |
| | | VDQELDINRLSDYDVDHIVPQSFLKDDSID |
| | | NKVLTRSDKNRGKSDNVPSEEVVKKMKNYW |
| | | RQLLNAKLITQRKFDNLTKAERGGLSELDK |
| | | AGFIKRQLVETRQITKHVAQILDSRMNTKY |
| | | DENDKLIREVKVITLKSKLVSDFRKDFQFY |
| | | KVREINNYHHAHDAYLNAVVGTALIKKYPK |
| | | LESEFVYGDYKVYDVRKMIAKSEQEIGKAT |
| | | AKYFFYSNIMNFFKTEITLANGEIRKRPLI |
| | | ETNGETGEIVWDKGRDFATVRKVLSMPQVN |
| | | IVKKTEVQTGGFSKESILPKRNSDKLIARK |
| | | KDWDPKKYGGFVSPTVAYSVLVVAKVEKGK |
| | | SKKLKSVKELLGITIMERSSFEKNPIDFLE |
| | | AKGYKEVKKDLIIKLPKYSLFELENGRKRM |
| | | LASARELQKGNELALPSKYVNFLYLASHYE |
| | | KLKGSPEDNEQKQLFVEQHKHYLDEIIEQI |
| | | SEFSKRVILADANLDKVLSAYNKHRDKPIR |
| | | EQAENIIHLFTLTNLGAPAAFKYFDTTIDR |
| | | KQYRSTKEVLDATLIHQSITGLYETRIDLS |
| | | QLGGDEGADKRTADGSEFESPKKKRKV |
| 02. | 1437 | MSEVEFSHEYWMRHALTLAKRARDEREVPV |
| monoABE8.1_ | | GAVLVLNNRVIGEGWNRAIGLHDPTAHAEI |
| bpN | | MALRQGGLVMQNYRLIDATLYVTFEPCVMC |
| LS + | | AGAMIHSRIGRVVFGVRNAKTGAAGSLMDV |
| Y147R | | LHYPGMNHRVEITEGILADECAALLCRFFR |
| polypeptide | | MPRQVFNAQKKAQSSTDSGGSSGGSSGSET |
| sequence | | PGTSESATPESSGGSSGGSDKKYSIGLAIG |
| | | TNSVGWAVITDEYKVPSKKFKVLGNTDRHS |
| | | IKKNLIGALLFDSGETAEATRLKRTARRRY |
| | | TRRKNRICYLQEIFSNEMAKVDDSFFHRLE |
| | | ESFLVEEDKKHERHPIFGNIVDEVAYHEKY |
| | | PTIYHLRKKLVDSTDKADLRLIYLALAHMI |
| | | KFRGHFLIEGDLNPDNSDVDKLFIQLVQTY |
| | | NQLFEENPINASGVDAKAILSARLSKSRRL |
| | | ENLIAQLPGEKKNGLFGNLIALSLGLTPNF |
| | | KSNFDLAEDAKLQLSKDTYDDDLDNLLAQI |
| | | GDQYADLFLAAKNLSDAILLSDILRVNTEI |
| | | TKAPLSASMIKRYDEHHQDLTLLKALVRQQ |
| | | LPEKYKEIFFDQSKNGYAGYIDGGASQEEF |
| | | YKFIKPILEKMDGTEELLVKLNREDLLRKQ |
| | | RTFDNGSIPHQIHLGELHAILRRQEDFYPF |
| | | LKDNREKIEKILTFRIPYYVGPLARGNSRF |
| | | AWMTRKSEETITPWNFEEWDKGASAQSFIE |
| | | RMTNFDKNLPNEKVLPKHSLLYEYFTVYNE |
| | | LTKVKYVTEGMRKPAFLSGEQKKAIVDLLF |
| | | KTNRKVTVKQLKEDYFKKIECFDSVEISGV |
| | | EDRFNASLGTYHDLLKIIKDKDFLDNEENE |
| | | DILEDIVLTLTLFEDREMIEERLKTYAHLF |
| | | DDKVMKQLKRRRYTGWGRLSRKLINGIRDK |
| | | QSGKTILDFLKSDGFANRNFMQLIHDDSLT |
| | | FKEDIQKAQVSGQGDSLHEHIANLAGSPAI |
| | | KKGILQTVKVVDELVKVMGRHKPENIVIEM |
| | | ARENQTTQKGQKNSRERMKRIEEGIKELGS |
| | | QILKEHPVENTQLQNEKLYLYYLQNGRDMY |
| | | VDQELDINRLSDYDVDHIVPQSFLKDDSID |
| | | NKVLTRSDKNRGKSDNVPSEEVVKKMKNYW |
| | | RQLLNAKLITQRKFDNLTKAERGGLSELDK |
| | | AGFIKRQLVETRQITKHVAQILDSRMNTKY |
| | | DENDKLIREVKVITLKSKLVSDFRKDFQFY |
| | | KVREINNYHHAHDAYLNAVVGTALIKKYPK |
| | | LESEFVYGDYKVYDVRKMIAKSEQEIGKAT |
| | | AKYFFYSNIMNFFKTEITLANGEIRKRPLI |
| | | ETNGETGEIVWDKGRDFATVRKVLSMPQVN |
| | | IVKKTEVQTGGFSKESILPKRNSDKLIARK |
| | | KDWDPKKYGGFVSPTVAYSVLVVAKVEKGK |
| | | SKKLKSVKELLGITIMERSSFEKNPIDFLE |
| | | AKGYKEVKKDLIIKLPKYSLFELENGRKRM |
| | | LASARELQKGNELALPSKYVNFLYLASHYE |
| | | KLKGSPEDNEQKQLFVEQHKHYLDEIIEQI |
| | | SEFSKRVILADANLDKVLSAYNKHRDKPIR |
| | | EQAENIIHLFTLTNLGAPAAFKYFDTTIDR |
| | | KQYRSTKEVLDATLIHQSITGLYETRIDLS |
| | | QLGGDEGADKRTADGSEFESPKKKRKV |
| 03. | 1438 | MSEVEFSHEYWMRHALTLAKRARDEREVPV |
| monoABE8.1_ | | GAVLVLNNRVIGEGWNRAIGLHDPTAHAEI |
| bpN | | MALRQGGLVMQNYRLIDATLYVTFEPCVMC |
| LS + Q154S | | AGAMIHSRIGRVVFGVRNAKTGAAGSLMDV |
| polypeptide | | LHYPGMNHRVEITEGILADECAALLCYFFR |
| sequence | | MPRSVFNAQKKAQSSTDSGGSSGGSSGSET |
| | | PGTSESATPESSGGSSGGSDKKYSIGLAIG |
| | | TNSVGWAVITDEYKVPSKKFKVLGNTDRHS |
| | | IKKNLIGALLFDSGETAEATRLKRTARRRY |
| | | TRRKNRICYLQEIFSNEMAKVDDSFFHRLE |
| | | ESFLVEEDKKHERHPIFGNIVDEVAYHEKY |
| | | PTIYHLRKKLVDSTDKADLRLIYLALAHMI |
| | | KFRGHFLIEGDLNPDNSDVDKLFIQLVQTY |
| | | NQLFEENPINASGVDAKAILSARLSKSRRL |
| | | ENLIAQLPGEKKNGLFGNLIALSLGLTPNF |
| | | KSNFDLAEDAKLQLSKDTYDDDLDNLLAQI |
| | | GDQYADLFLAAKNLSDAILLSDILRVNTEI |
| | | TKAPLSASMIKRYDEHHQDLTLLKALVRQQ |
| | | LPEKYKEIFFDQSKNGYAGYIDGGASQEEF |
| | | YKFIKPILEKMDGTEELLVKLNREDLLRKQ |
| | | RTFDNGSIPHQIHLGELHAILRRQEDFYPF |
| | | LKDNREKIEKILTFRIPYYVGPLARGNSRF |
| | | AWMTRKSEETITPWNFEEWDKGASAQSFIE |
| | | RMTNFDKNLPNEKVLPKHSLLYEYFTVYNE |
| | | LTKVKYVTEGMRKPAFLSGEQKKAIVDLLF |
| | | KTNRKVTVKQLKEDYFKKIECFDSVEISGV |
| | | EDRFNASLGTYHDLLKIIKDKDFLDNEENE |
| | | DILEDIVLTLTLFEDREMIEERLKTYAHLF |
| | | DDKVMKQLKRRRYTGWGRLSRKLINGIRDK |
| | | QSGKTILDFLKSDGFANRNFMQLIHDDSLT |
| | | FKEDIQKAQVSGQGDSLHEHIANLAGSPAI |
| | | KKGILQTVKWDELVKVMGRHKPENIVIEMA |
| | | RENQTTQKGQKNSRERMKRIEEGIKELGSQ |
| | | ILKEHPVENTQLQNEKLYLYYLQNGRDMYV |
| | | DQELDINRLSDYDVDHIVPQSFLKDDSIDN |
| | | KVLTRSDKNRGKSDNVPSEEWKKMKNYWRQ |
| | | LLNAKLITQRKFDNLTKAERGGLSELDKAG |
| | | FIKRQLVETRQITKHVAQILDSRMNTKYDE |
| | | NDKLIREVKVITLKSKLVSDFRKDFQFYKV |
| | | REINNYHHAHDAYLNAVVGTALIKKYPKLE |
| | | SEFVYGDYKVYDVRKMIAKSEQEIGKATAK |
| | | YFFYSNIMNFFKTEITLANGEIRKRPLIET |
| | | NGETGEIVWDKGRDFATVRKVLSMPQVNIV |
| | | KKTEVQTGGFSKESILPKRNSDKLIARKKD |
| | | WDPKKYGGFVSPTVAYSVLWAKVEKGKSKK |
| | | LKSVKELLGITIMERSSFEKNPIDFLEAKG |
| | | YKEVKKDLIIKLPKYSLFELENGRKRMLAS |
| | | ARELQKGNELALPSKYVNFLYLASHYEKLK |
| | | GSPEDNEQKQLFVEQHKHYLDEIIEQISEF |
| | | SKRVILADANLDKVLSAYNKHRDKPIREQA |
| | | ENIIHLFTLTNLGAPAAFKYFDTTIDRKQY |
| | | RSTKEVLDATLIHQSITGLYETRIDLSQLG |
| | | GDEGADKRTADGSEFESPKKKRKV |
| 04. | 1439 | MSEVEFSHEYWMRHALTLAKRARDEREVPV |
| monoABE8.1_ | | GAVLVLNNRVIGEGWNRAIGLHDPTAHAEI |
| bpN | | MALRQGGLVMQNYRLIDATLYVTFEPCVMC |
| LS + | | AGAMIHSRIGRVVFGVRNAKTGAAGSLMDV |
| Y123H | | LHHPGMNHRVEITEGILADECAALLCYFFR |
| polypeptide | | MPRQVFNAQKKAQSSTDSGGSSGGSSGSET |
| sequence | | PGTSESATPESSGGSSGGSDKKYSIGLAIG |
| | | TNSVGWAVITDEYKVPSKKFKVLGNTDRHS |
| | | IKKNLIGALLFDSGETAEATRLKRTARRRY |
| | | TRRKNRICYLQEIFSNEMAKVDDSFFHRLE |
| | | ESFLVEEDKKHERHPIFGNIVDEVAYHEKY |
| | | PTIYHLRKKLVDSTDKADLRLIYLALAHMI |
| | | KFRGHFLIEGDLNPDNSDVDKLFIQLVQTY |
| | | NQLFEENPINASGVDAKAILSARLSKSRRL |
| | | ENLIAQLPGEKKNGLFGNLIALSLGLTPNF |
| | | KSNFDLAEDAKLQLSKDTYDDDLDNLLAQI |
| | | GDQYADLFLAAKNLSDAILLSDILRVNTEI |
| | | TKAPLSASMIKRYDEHHQDLTLLKALVRQQ |
| | | LPEKYKEIFFDQSKNGYAGYIDGGASQEEF |
| | | YKFIKPILEKMDGTEELLVKLNREDLLRKQ |
| | | RTFDNGSIPHQIHLGELHAILRRQEDFYPF |
| | | LKDNREKIEKILTFRIPYYVGPLARGNSRF |
| | | AWMTRKSEETITPWNFEEWDKGASAQSFIE |
| | | RMTNFDKNLPNEKVLPKHSLLYEYFTVYNE |
| | | LTKVKYVTEGMRKPAFLSGEQKKAIVDLLF |
| | | KTNRKVTVKQLKEDYFKKIECFDSVEISGV |
| | | EDRFNASLGTYHDLLKIIKDKDFLDNEENE |
| | | DILEDIVLTLTLFEDREMIEERLKTYAHLF |
| | | DDKVMKQLKRRRYTGWGRLSRKLINGIRDK |
| | | QSGKTILDFLKSDGFANRNFMQLIHDDSLT |
| | | FKEDIQKAQVSGQGDSLHEHIANLAGSPAI |
| | | KKGILQTVKVVDELVKVMGRHKPENIVIEM |
| | | ARENQTTQKGQKNSRERMKRIEEGIKELGS |
| | | QILKEHPVENTQLQNEKLYLYYLQNGRDMY |
| | | VDQELDINRLSDYDVDHIVPQSFLKDDSID |
| | | NKVLTRSDKNRGKSDNVPSEEVVKKMKNYW |
| | | RQLLNAKLITQRKFDNLTKAERGGLSELDK |
| | | AGFIKRQLVETRQITKHVAQILDSRMNTKY |
| | | DENDKLIREVKVITLKSKLVSDFRKDFQFY |
| | | KVREINNYHHAHDAYLNAVVGTALIKKYPK |
| | | LESEFVYGDYKVYDVRKMIAKSEQEIGKAT |
| | | AKYFFYSNIMNFFKTEITLANGEIRKRPLI |
| | | ETNGETGEIVWDKGRDFATVRKVLSMPQVN |
| | | IVKKTEVQTGGFSKESILPKRNSDKLIARK |
| | | KDWDPKKYGGFVSPTVAYSVLVVAKVEKGK |
| | | SKKLKSVKELLGITIMERSSFEKNPIDFLE |
| | | AKGYKEVKKDLIIKLPKYSLFELENGRKRM |
| | | LASARELQKGNELALPSKYVNFLYLASHYE |
| | | KLKGSPEDNEQKQLFVEQHKHYLDEIIEQI |
| | | SEFSKRVILADANLDKVLSAYNKHRDKPIR |
| | | EQAENIIHLFTLTNLGAPAAFKYFDTTIDR |
| | | KQYRSTKEVLDATLIHQSITGLYETRIDLS |
| | | QLGGDEGADKRTADGSEFESPKKKRKV |
| 05. | 1440 | MSEVEFSHEYWMRHALTLAKRARDEREVPV |
| monoABE8.1_ | | GAVLVLNNRVIGEGWNRAIGLHDPTAHAEI |
| bpN | | MALRQGGLVMQNYRLIDATLYSTFEPCVMC |
| LS + | | AGAMIHSRIGRVVFGVRNAKTGAAGSLMDV |
| V82S | | LHYPGMNHRVEITEGILADECAALLCYFFR |
| polypeptide | | MPRQVFNAQKKAQSSTDSGGSSGGSSGSET |
| sequence | | PGTSESATPESSGGSSGGSDKKYSIGLAIG |
| | | TNSVGWAVITDEYKVPSKKFKVLGNTDRHS |
| | | IKKNLIGALLFDSGETAEATRLKRTARRRY |
| | | TRRKNRICYLQEIFSNEMAKVDDSFFHRLE |
| | | ESFLVEEDKKHERHPIFGNIVDEVAYHEKY |
| | | PTIYHLRKKLVDSTDKADLRLIYLALAHMI |
| | | KFRGHFLIEGDLNPDNSDVDKLFIQLVQTY |
| | | NQLFEENPINASGVDAKAILSARLSKSRRL |
| | | ENLIAQLPGEKKNGLFGNLIALSLGLTPNF |
| | | KSNFDLAEDAKLQLSKDTYDDDLDNLLAQI |
| | | GDQYADLFLAAKNLSDAILLSDILRVNTEI |
| | | TKAPLSASMIKRYDEHHQDLTLLKALVRQQ |
| | | LPEKYKEIFFDQSKNGYAGYIDGGASQEEF |
| | | YKFIKPILEKMDGTEELLVKLNREDLLRKQ |
| | | RTFDNGSIPHQIHLGELHAILRRQEDFYPF |
| | | LKDNREKIEKILTFRIPYYVGPLARGNSRF |
| | | AWMTRKSEETITPWNFEEWDKGASAQSFIE |
| | | RMTNFDKNLPNEKVLPKHSLLYEYFTVYNE |
| | | LTKVKYVTEGMRKPAFLSGEQKKAIVDLLF |
| | | KTNRKVTVKQLKEDYFKKIECFDSVEISGV |
| | | EDRFNASLGTYHDLLKIIKDKDFLDNEENE |
| | | DILEDIVLTLTLFEDREMIEERLKTYAHLF |
| | | DDKVMKQLKRRRYTGWGRLSRKLINGIRDK |
| | | QSGKTILDFLKSDGFANRNFMQLIHDDSLT |
| | | FKEDIQKAQVSGQGDSLHEHIANLAGSPAI |
| | | KKGILQTVKVVDELVKVMGRHKPENIVIEM |
| | | ARENQTTQKGQKNSRERMKRIEEGIKELGS |
| | | QILKEHPVENTQLQNEKLYLYYLQNGRDMY |
| | | VDQELDINRLSDYDVDHIVPQSFLKDDSID |
| | | NKVLTRSDKNRGKSDNVPSEEVVKKMKNYW |
| | | RQLLNAKLITQRKFDNLTKAERGGLSELDK |
| | | AGFIKRQLVETRQITKHVAQILDSRMNTKY |
| | | DENDKLIREVKVITLKSKLVSDFRKDFQFY |
| | | KVREINNYHHAHDAYLNAVVGTALIKKYPK |
| | | LESEFVYGDYKVYDVRKMIAKSEQEIGKAT |
| | | AKYFFYSNIMNFFKTEITLANGEIRKRPLI |
| | | ETNGETGEIVWDKGRDFATVRKVLSMPQVN |
| | | IVKKTEVQTGGFSKESILPKRNSDKLIARK |
| | | KDWDPKKYGGFVSPTVAYSVLVVAKVEKGK |
| | | SKKLKSVKELLGITIMERSSFEKNPIDFLE |
| | | AKGYKEVKKDLIIKLPKYSLFELENGRKRM |
| | | LASARELQKGNELALPSKYVNFLYLASHYE |
| | | KLKGSPEDNEQKQLFVEQHKHYLDEIIEQI |
| | | SEFSKRVILADANLDKVLSAYNKHRDKPIR |
| | | EQAENIIHLFTLTNLGAPAAFKYFDTTIDR |
| | | KQYRSTKEVLDATLIHQSITGLYETRIDLS |
| | | QLGGDEGADKRTADGSEFESPKKKRKV |
| 06. | 1441 | MSEVEFSHEYWMRHALTLAKRARDEREVPV |
| monoABE8.1_ | | GAVLVLNNRVIGEGWNRAIGLHDPTAHAEI |
| bpN | | MALRQGGLVMQNYRLIDATLYVTFEPCVMC |
| LS + T166R | | AGAMIHSRIGRVVFGVRNAKTGAAGSLMDV |
| polypeptide | | LHYPGMNHRVEITEGILADECAALLCYFFR |
| sequence | | MPRQVFNAQKKAQSSRDSGGSSGGSSGSET |
| | | PGTSESATPESSGGSSGGSDKKYSIGLAIG |
| | | TNSVGWAVITDEYKVPSKKFKVLGNTDRHS |
| | | IKKNLIGALLFDSGETAEATRLKRTARRRY |
| | | TRRKNRICYLQEIFSNEMAKVDDSFFHRLE |
| | | ESFLVEEDKKHERHPIFGNIVDEVAYHEKY |
| | | PTIYHLRKKLVDSTDKADLRLIYLALAHMI |
| | | KFRGHFLIEGDLNPDNSDVDKLFIQLVQTY |
| | | NQLFEENPINASGVDAKAILSARLSKSRRL |
| | | ENLIAQLPGEKKNGLFGNLIALSLGLTPNF |
| | | KSNFDLAEDAKLQLSKDTYDDDLDNLLAQI |
| | | GDQYADLFLAAKNLSDAILLSDILRVNTEI |
| | | TKAPLSASMIKRYDEHHQDLTLLKALVRQQ |
| | | LPEKYKEIFFDQSKNGYAGYIDGGASQEEF |
| | | YKFIKPILEKMDGTEELLVKLNREDLLRKQ |
| | | RTFDNGSIPHQIHLGELHAILRRQEDFYPF |
| | | LKDNREKIEKILTFRIPYYVGPLARGNSRF |
| | | AWMTRKSEETITPWNFEEWDKGASAQSFIE |
| | | RMTNFDKNLPNEKVLPKHSLLYEYFTVYNE |
| | | LTKVKYVTEGMRKPAFLSGEQKKAIVDLLF |
| | | KTNRKVTVKQLKEDYFKKIECFDSVEISGV |
| | | EDRFNASLGTYHDLLKIIKDKDFLDNEENE |
| | | DILEDIVLTLTLFEDREMIEERLKTYAHLF |
| | | DDKVMKQLKRRRYTGWGRLSRKLINGIRDK |
| | | QSGKTILDFLKSDGFANRNFMQLIHDDSLT |
| | | FKEDIQKAQVSGQGDSLHEHIANLAGSPAI |
| | | KKGILQTVKVVDELVKVMGRHKPENIVIEM |
| | | ARENQTTQKGQKNSRERMKRIEEGIKELGS |
| | | QILKEHPVENTQLQNEKLYLYYLQNGRDMY |
| | | VDQELDINRLSDYDVDHIVPQSFLKDDSID |
| | | NKVLTRSDKNRGKSDNVPSEEVVKKMKNYW |
| | | RQLLNAKLITQRKFDNLTKAERGGLSELDK |
| | | AGFIKRQLVETRQITKHVAQILDSRMNTKY |
| | | DENDKLIREVKVITLKSKLVSDFRKDFQFY |
| | | KVREINNYHHAHDAYLNAVVGTALIKKYPK |
| | | LESEFVYGDYKVYDVRKMIAKSEQEIGKAT |
| | | AKYFFYSNIMNFFKTEITLANGEIRKRPLI |
| | | ETNGETGEIVWDKGRDFATVRKVLSMPQVN |
| | | IVKKTEVQTGGFSKESILPKRNSDKLIARK |
| | | KDWDPKKYGGFVSPTVAYSVLVVAKVEKGK |
| | | SKKLKSVKELLGITIMERSSFEKNPIDFLE |
| | | AKGYKEVKKDLIIKLPKYSLFELENGRKRM |
| | | LASARELQKGNELALPSKYVNFLYLASHYE |
| | | KLKGSPEDNEQKQLFVEQHKHYLDEIIEQI |
| | | SEFSKRVILADANLDKVLSAYNKHRDKPIR |
| | | EQAENIIHLFTLTNLGAPAAFKYFDTTIDR |
| | | KQYRSTKEVLDATLIHQSITGLYETRIDLS |
| | | QLGGDEGADKRTADGSEFESPKKKRKV |
| 07. | 1442 | MSEVEFSHEYWMRHALTLAKRARDEREVPV |
| monoABE8.1_ | | GAVLVLNNRVIGEGWNRAIGLHDPTAHAEI |
| bpN | | MALRQGGLVMQNYRLIDATLYVTFEPCVMC |
| LS + Q154R | | AGAMIHSRIGRVVFGVRNAKTGAAGSLMDV |
| polypeptide | | LHYPGMNHRVEITEGILADECAALLCYFFR |
| sequence | | MPRRVFNAQKKAQSSTDSGGSSGGSSGSET |
| | | PGTSESATPESSGGSSGGSDKKYSIGLAIG |
| | | TNSVGWAVITDEYKVPSKKFKVLGNTDRHS |
| | | IKKNLIGALLFDSGETAEATRLKRTARRRY |
| | | TRRKNRICYLQEIFSNEMAKVDDSFFHRLE |
| | | ESFLVEEDKKHERHPIFGNIVDEVAYHEKY |
| | | PTIYHLRKKLVDSTDKADLRLIYLALAHMI |
| | | KFRGHFLIEGDLNPDNSDVDKLFIQLVQTY |
| | | NQLFEENPINASGVDAKAILSARLSKSRRL |
| | | ENLIAQLPGEKKNGLFGNLIALSLGLTPNF |
| | | KSNFDLAEDAKLQLSKDTYDDDLDNLLAQI |
| | | GDQYADLFLAAKNLSDAILLSDILRVNTEI |
| | | TKAPLSASMIKRYDEHHQDLTLLKALVRQQ |
| | | LPEKYKEIFFDQSKNGYAGYIDGGASQEEF |
| | | YKFIKPILEKMDGTEELLVKLNREDLLRKQ |
| | | RTFDNGSIPHQIHLGELHAILRRQEDFYPF |
| | | LKDNREKIEKILTFRIPYYVGPLARGNSRF |
| | | AWMTRKSEETITPWNFEEWDKGASAQSFIE |
| | | RMTNFDKNLPNEKVLPKHSLLYEYFTVYNE |
| | | LTKVKYVTEGMRKPAFLSGEQKKAIVDLLF |
| | | KTNRKVTVKQLKEDYFKKIECFDSVEISGV |
| | | EDRFNASLGTYHDLLKIIKDKDFLDNEENE |
| | | DILEDIVLTLTLFEDREMIEERLKTYAHLF |
| | | DDKVMKQLKRRRYTGWGRLSRKLINGIRDK |
| | | QSGKTILDFLKSDGFANRNFMQLIHDDSLT |
| | | FKEDIQKAQVSGQGDSLHEHIANLAGSPAI |
| | | KKGILQTVKVVDELVKVMGRHKPENIVIEM |
| | | ARENQTTQKGQKNSRERMKRIEEGIKELGS |
| | | QILKEHPVENTQLQNEKLYLYYLQNGRDMY |
| | | VDQELDINRLSDYDVDHIVPQSFLKDDSID |
| | | NKVLTRSDKNRGKSDNVPSEEVVKKMKNYW |
| | | RQLLNAKLITQRKFDNLTKAERGGLSELDK |
| | | AGFIKRQLVETRQITKHVAQILDSRMNTKY |
| | | DENDKLIREVKVITLKSKLVSDFRKDFQFY |
| | | KVREINNYHHAHDAYLNAVVGTALIKKYPK |
| | | LESEFVYGDYKVYDVRKMIAKSEQEIGKAT |
| | | AKYFFYSNIMNFFKTEITLANGEIRKRPLI |
| | | ETNGETGEIVWDKGRDFATVRKVLSMPQVN |
| | | IVKKTEVQTGGFSKESILPKRNSDKLIARK |
| | | KDWDPKKYGGFVSPTVAYSVLVVAKVEKGK |
| | | SKKLKSVKELLGITIMERSSFEKNPIDFLE |
| | | AKGYKEVKKDLIIKLPKYSLFELENGRKRM |
| | | LASARELQKGNELALPSKYVNFLYLASHYE |
| | | KLKGSPEDNEQKQLFVEQHKHYLDEIIEQI |
| | | SEFSKRVILADANLDKVLSAYNKHRDKPIR |
| | | EQAENIIHLFTLTNLGAPAAFKYFDTTIDR |
| | | KQYRSTKEVLDATLIHQSITGLYETRIDLS |
| | | QLGGDEGADKRTADGSEFESPKKKRKV |
| 08. | 1443 | MSEVEFSHEYWMRHALTLAKRARDEREVPV |
| monoABE8.1_ | | GAVLVLNNRVIGEGWNRAIGLHDPTAHAEI |
| bpN | | MALRQGGLVMQNYRLIDATLYVTFEPCVMC |
| LS | | AGAMIHSRIGRVVFGVRNAKTGAAGSLMDV |
| Y147R_ | | LHHPGMNHRVEITEGILADECAALLCRFFR |
| Q154R_ | | MPRRVFNAQKKAQSSTDSGGSSGGSSGSET |
| Y123H | | PGTSESATPESSGGSSGGSDKKYSIGLAIG |
| polypeptide | | TNSVGWAVITDEYKVPSKKFKVLGNTDRHS |
| sequence | | IKKNLIGALLFDSGETAEATRLKRTARRRY |
| | | TRRKNRICYLQEIFSNEMAKVDDSFFHRLE |
| | | ESFLVEEDKKHERHPIFGNIVDEVAYHEKY |
| | | PTIYHLRKKLVDSTDKADLRLIYLALAHMI |
| | | KFRGHFLIEGDLNPDNSDVDKLFIQLVQTY |
| | | NQLFEENPINASGVDAKAILSARLSKSRRL |
| | | ENLIAQLPGEKKNGLFGNLIALSLGLTPNF |
| | | KSNFDLAEDAKLQLSKDTYDDDLDNLLAQI |
| | | GDQYADLFLAAKNLSDAILLSDILRVNTEI |
| | | TKAPLSASMIKRYDEHHQDLTLLKALVRQQ |
| | | LPEKYKEIFFDQSKNGYAGYIDGGASQEEF |
| | | YKFIKPILEKMDGTEELLVKLNREDLLRKQ |
| | | RTFDNGSIPHQIHLGELHAILRRQEDFYPF |
| | | LKDNREKIEKILTFRIPYYVGPLARGNSRF |
| | | AWMTRKSEETITPWNFEEWDKGASAQSFIE |
| | | RMTNFDKNLPNEKVLPKHSLLYEYFTVYNE |
| | | LTKVKYVTEGMRKPAFLSGEQKKAIVDLLF |
| | | KTNRKVTVKQLKEDYFKKIECFDSVEISGV |
| | | EDRFNASLGTYHDLLKIIKDKDFLDNEENE |
| | | DILEDIVLTLTLFEDREMIEERLKTYAHLF |
| | | DDKVMKQLKRRRYTGWGRLSRKLINGIRDK |
| | | QSGKTILDFLKSDGFANRNFMQLIHDDSLT |
| | | FKEDIQKAQVSGQGDSLHEHIANLAGSPAI |
| | | KKGILQTVKWDELVKVMGRHKPENIVIEMA |
| | | RENQTTQKGQKNSRERMKRIEEGIKELGSQ |
| | | ILKEHPVENTQLQNEKLYLYYLQNGRDMYV |
| | | DQELDINRLSDYDVDHIVPQSFLKDDSIDN |
| | | KVLTRSDKNRGKSDNVPSEEVVKKMKNYWR |
| | | QLLNAKLITQRKFDNLTKAERGGLSELDKA |
| | | GFIKRQLVETRQITKHVAQILDSRMNTKYD |
| | | ENDKLIREVKVITLKSKLVSDFRKDFQFYK |
| | | VREINNYHHAHDAYLNAVVGTALIKKYPKL |
| | | ESEFVYGDYKVYDVRKMIAKSEQEIGKATA |
| | | KYFFYSNIMNFFKTEITLANGEIRKRPLIE |
| | | TNGETGEIVWDKGRDFATVRKVLSMPQVNI |
| | | VKKTEVQTGGFSKESILPKRNSDKLIARKK |
| | | DWDPKKYGGFVSPTVAYSVLVVAKVEKGKS |
| | | KKLKSVKELLGITIMERSSFEKNPIDFLEA |
| | | KGYKEVKKDLIIKLPKYSLFELENGRKRML |
| | | ASARELQKGNELALPSKYVNFLYLASHYEK |
| | | LKGSPEDNEQKQLFVEQHKHYLDEIIEQIS |
| | | EFSKRVILADANLDKVLSAYNKHRDKPIRE |
| | | QAENIIHLFTLTNLGAPAAFKYFDTTIDRK |
| | | QYRSTKEVLDATLIHQSITGLYETRIDLSQ |
| | | LGGDEGADKRTADGSEFESPKKKRKV |
| 09. | 1444 | MSEVEFSHEYWMRHALTLAKRARDEREVPV |
| monoABE8.1_ | | GAVLVLNNRVIGEGWNRAIGLHDPTAHAEI |
| bpN | | MALRQGGLVMQNYRLYDATLYVTFEPCVMC |
| LS | | AGAMIHSRIGRVVFGVRNAKTGAAGSLMDV |
| Y147R_ | | LHYPGMNHRVEITEGILADECAALLCRFFR |
| Q154R_ | | MPRRVFNAQKKAQSSTDSGGSSGGSSGSET |
| I76Y | | PGTSESATPESSGGSSGGSDKKYSIGLAIG |
| polypeptide | | TNSVGWAVITDEYKVPSKKFKVLGNTDRHS |
| sequence | | IKKNLIGALLFDSGETAEATRLKRTARRRY |
| | | TRRKNRICYLQEIFSNEMAKVDDSFFHRLE |
| | | ESFLVEEDKKHERHPIFGNIVDEVAYHEKY |
| | | PTIYHLRKKLVDSTDKADLRLIYLALAHMI |
| | | KFRGHFLIEGDLNPDNSDVDKLFIQLVQTY |
| | | NQLFEENPINASGVDAKAILSARLSKSRRL |
| | | ENLIAQLPGEKKNGLFGNLIALSLGLTPNF |
| | | KSNFDLAEDAKLQLSKDTYDDDLDNLLAQI |
| | | GDQYADLFLAAKNLSDAILLSDILRVNTEI |
| | | TKAPLSASMIKRYDEHHQDLTLLKALVRQQ |
| | | LPEKYKEIFFDQSKNGYAGYIDGGASQEEF |
| | | YKFIKPILEKMDGTEELLVKLNREDLLRKQ |
| | | RTFDNGSIPHQIHLGELHAILRRQEDFYPF |
| | | LKDNREKIEKILTFRIPYYVGPLARGNSRF |
| | | AWMTRKSEETITPWNFEEWDKGASAQSFIE |
| | | RMTNFDKNLPNEKVLPKHSLLYEYFTVYNE |
| | | LTKVKYVTEGMRKPAFLSGEQKKAIVDLLF |
| | | KTNRKVTVKQLKEDYFKKIECFDSVEISGV |
| | | EDRFNASLGTYHDLLKIIKDKDFLDNEENE |
| | | DILEDIVLTLTLFEDREMIEERLKTYAHLF |
| | | DDKVMKQLKRRRYTGWGRLSRKLINGIRDK |
| | | QSGKTILDFLKSDGFANRNFMQLIHDDSLT |
| | | FKEDIQKAQVSGQGDSLHEHIANLAGSPAI |
| | | KKGILQTVKVVDELVKVMGRHKPENIVIEM |
| | | ARENQTTQKGQKNSRERMKRIEEGIKELGS |
| | | QILKEHPVENTQLQNEKLYLYYLQNGRDMY |
| | | VDQELDINRLSDYDVDHIVPQSFLKDDSID |
| | | NKVLTRSDKNRGKSDNVPSEEVVKKMKNYW |
| | | RQLLNAKLITQRKFDNLTKAERGGLSELDK |
| | | AGFIKRQLVETRQITKHVAQILDSRMNTKY |
| | | DENDKLIREVKVITLKSKLVSDFRKDFQFY |
| | | KVREINNYHHAHDAYLNAVVGTALIKKYPK |
| | | LESEFVYGDYKVYDVRKMIAKSEQEIGKAT |
| | | AKYFFYSNIMNFFKTEITLANGEIRKRPLI |
| | | ETNGETGEIVWDKGRDFATVRKVLSMPQVN |
| | | IVKKTEVQTGGFSKESILPKRNSDKLIARK |
| | | KDWDPKKYGGFVSPTVAYSVLVVAKVEKGK |
| | | SKKLKSVKELLGITIMERSSFEKNPIDFLE |
| | | AKGYKEVKKDLIIKLPKYSLFELENGRKRM |
| | | LASARELQKGNELALPSKYVNFLYLASHYE |
| | | KLKGSPEDNEQKQLFVEQHKHYLDEIIEQI |
| | | SEFSKRVILADANLDKVLSAYNKHRDKPIR |
| | | EQAENIIHLFTLTNLGAPAAFKYFDTTIDR |
| | | KQYRSTKEVLDATLIHQSITGLYETRIDLS |
| | | QLGGDEGADKRTADGSEFESPKKKRKV |
| 10. | 1445 | MSEVEFSHEYWMRHALTLAKRARDEREVPV |
| monoABE8.1_ | | GAVLVLNNRVIGEGWNRAIGLHDPTAHAEI |
| bpN | | MALRQGGLVMQNYRLIDATLYVTFEPCVMC |
| LS + Y147R_ | | AGAMIHSRIGRVVFGVRNAKTGAAGSLMDV |
| Q154R_ | | LHYPGMNHRVEITEGILADECAALLCRFFR |
| T166R | | MPRRVFNAQKKAQSSRDSGGSSGGSSGSET |
| polypeptide | | PGTSESATPESSGGSSGGSDKKYSIGLAIG |
| sequence | | TNSVGWAVITDEYKVPSKKFKVLGNTDRHS |
| | | IKKNLIGALLFDSGETAEATRLKRTARRRY |
| | | TRRKNRICYLQEIFSNEMAKVDDSFFHRLE |
| | | ESFLVEEDKKHERHPIFGNIVDEVAYHEKY |
| | | PTIYHLRKKLVDSTDKADLRLIYLALAHMI |
| | | KFRGHFLIEGDLNPDNSDVDKLFIQLVQTY |
| | | NQLFEENPINASGVDAKAILSARLSKSRRL |
| | | ENLIAQLPGEKKNGLFGNLIALSLGLTPNF |
| | | KSNFDLAEDAKLQLSKDTYDDDLDNLLAQI |
| | | GDQYADLFLAAKNLSDAILLSDILRVNTEI |
| | | TKAPLSASMIKRYDEHHQDLTLLKALVRQQ |
| | | LPEKYKEIFFDQSKNGYAGYIDGGASQEEF |
| | | YKFIKPILEKMDGTEELLVKLNREDLLRKQ |
| | | RTFDNGSIPHQIHLGELHAILRRQEDFYPF |
| | | LKDNREKIEKILTFRIPYYVGPLARGNSRF |
| | | AWMTRKSEETITPWNFEEWDKGASAQSFIE |
| | | RMTNFDKNLPNEKVLPKHSLLYEYFTVYNE |
| | | LTKVKYVTEGMRKPAFLSGEQKKAIVDLLF |
| | | KTNRKVTVKQLKEDYFKKIECFDSVEISGV |
| | | EDRFNASLGTYHDLLKIIKDKDFLDNEENE |
| | | DILEDIVLTLTLFEDREMIEERLKTYAHLF |
| | | DDKVMKQLKRRRYTGWGRLSRKLINGIRDK |
| | | QSGKTILDFLKSDGFANRNFMQLIHDDSLT |
| | | FKEDIQKAQVSGQGDSLHEHIANLAGSPAI |
| | | KKGILQTVKVVDELVKVMGRHKPENIVIEM |
| | | ARENQTTQKGQKNSRERMKRIEEGIKELGS |
| | | QILKEHPVENTQLQNEKLYLYYLQNGRDMY |
| | | VDQELDINRLSDYDVDHIVPQSFLKDDSID |
| | | NKVLTRSDKNRGKSDNVPSEEVVKKMKNYW |
| | | RQLLNAKLITQRKFDNLTKAERGGLSELDK |
| | | AGFIKRQLVETRQITKHVAQILDSRMNTKY |
| | | DENDKLIREVKVITLKSKLVSDFRKDFQFY |
| | | KVREINNYHHAHDAYLNAWGTALIKKYPKL |
| | | ESEFVYGDYKVYDVRKMIAKSEQEIGKATA |
| | | KYFFYSNIMNFFKTEITLANGEIRKRPLIE |
| | | TNGETGEIVWDKGRDFATVRKVLSMPQVNI |
| | | VKKTEVQTGGFSKESILPKRNSDKLIARKK |
| | | DWDPKKYGGFVSPTVAYSVLVVAKVEKGKS |
| | | KKLKSVKELLGITIMERSSFEKNPIDFLEA |
| | | KGYKEVKKDLIIKLPKYSLFELENGRKRML |
| | | ASARELQKGNELALPSKYVNFLYLASHYEK |
| | | LKGSPEDNEQKQLFVEQHKHYLDEIIEQIS |
| | | EFSKRVILADANLDKVLSAYNKHRDKPIRE |
| | | QAENIIHLFTLTNLGAPAAFKYFDTTIDRK |
| | | QYRSTKEVLDATLIHQSITGLYETRIDLSQ |
| | | LGGDEGADKRTADGSEFESPKKKRKV |
| 11. | 1446 | MSEVEFSHEYWMRHALTLAKRARDEREVPV |
| monoABE8.1_ | | GAVLVLNNRVIGEGWNRAIGLHDPTAHAEI |
| bpN | | MALRQGGLVMQNYRLIDATLYVTFEPCVMC |
| LS + Y147T_ | | AGAMIHSRIGRVVFGVRNAKTGAAGSLMDV |
| Q154R | | LHYPGMNHRVEITEGILADECAALLCTFFR |
| polypeptide | | MPRRVFNAQKKAQSSTDSGGSSGGSSGSET |
| sequence | | PGTSESATPESSGGSSGGSDKKYSIGLAIG |
| | | TNSVGWAVITDEYKVPSKKFKVLGNTDRHS |
| | | IKKNLIGALLFDSGETAEATRLKRTARRRY |
| | | TRRKNRICYLQEIFSNEMAKVDDSFFHRLE |
| | | ESFLVEEDKKHERHPIFGNIVDEVAYHEKY |
| | | PTIYHLRKKLVDSTDKADLRLIYLALAHMI |
| | | KFRGHFLIEGDLNPDNSDVDKLFIQLVQTY |
| | | NQLFEENPINASGVDAKAILSARLSKSRRL |
| | | ENLIAQLPGEKKNGLFGNLIALSLGLTPNF |
| | | KSNFDLAEDAKLQLSKDTYDDDLDNLLAQI |
| | | GDQYADLFLAAKNLSDAILLSDILRVNTEI |
| | | TKAPLSASMIKRYDEHHQDLTLLKALVRQQ |
| | | LPEKYKEIFFDQSKNGYAGYIDGGASQEEF |
| | | YKFIKPILEKMDGTEELLVKLNREDLLRKQ |
| | | RTFDNGSIPHQIHLGELHAILRRQEDFYPF |
| | | LKDNREKIEKILTFRIPYYVGPLARGNSRF |
| | | AWMTRKSEETITPWNFEEWDKGASAQSFIE |
| | | RMTNFDKNLPNEKVLPKHSLLYEYFTVYNE |
| | | LTKVKYVTEGMRKPAFLSGEQKKAIVDLLF |
| | | KTNRKVTVKQLKEDYFKKIECFDSVEISGV |
| | | EDRFNASLGTYHDLLKIIKDKDFLDNEENE |
| | | DILEDIVLTLTLFEDREMIEERLKTYAHLF |
| | | DDKVMKQLKRRRYTGWGRLSRKLINGIRDK |
| | | QSGKTILDFLKSDGFANRNFMQLIHDDSLT |
| | | FKEDIQKAQVSGQGDSLHEHIANLAGSPAI |
| | | KKGILQTVKVVDELVKVMGRHKPENIVIEM |
| | | ARENQTTQKGQKNSRERMKRIEEGIKELGS |
| | | QILKEHPVENTQLQNEKLYLYYLQNGRDMY |
| | | VDQELDINRLSDYDVDHIVPQSFLKDDSID |
| | | NKVLTRSDKNRGKSDNVPSEEVVKKMKNYW |
| | | RQLLNAKLITQRKFDNLTKAERGGLSELDK |
| | | AGFIKRQLVETRQITKHVAQILDSRMNTKY |
| | | DENDKLIREVKVITLKSKLVSDFRKDFQFY |
| | | KVREINNYHHAHDAYLNAVVGTALIKKYPK |
| | | LESEFVYGDYKVYDVRKMIAKSEQEIGKAT |
| | | AKYFFYSNIMNFFKTEITLANGEIRKRPLI |
| | | ETNGETGEIVWDKGRDFATVRKVLSMPQVN |
| | | IVKKTEVQTGGFSKESILPKRNSDKLIARK |
| | | KDWDPKKYGGFVSPTVAYSVLVVAKVEKGK |
| | | SKKLKSVKELLGITIMERSSFEKNPIDFLE |
| | | AKGYKEVKKDLIIKLPKYSLFELENGRKRM |
| | | LASARELQKGNELALPSKYVNFLYLASHYE |
| | | KLKGSPEDNEQKQLFVEQHKHYLDEIIEQI |
| | | SEFSKRVILADANLDKVLSAYNKHRDKPIR |
| | | EQAENIIHLFTLTNLGAPAAFKYFDTTIDR |
| | | KQYRSTKEVLDATLIHQSITGLYETRIDLS |
| | | QLGGDEGADKRTADGSEFESPKKKRKV |
| 12. | 1447 | MSEVEFSHEYWMRHALTLAKRARDEREVPV |
| monoABE8.1_ | | GAVLVLNNRVIGEGWNRAIGLHDPTAHAEI |
| bpN | | MALRQGGLVMQNYRLIDATLYVTFEPCVMC |
| LS + Y147T_ | | AGAMIHSRIGRVVFGVRNAKTGAAGSLMDV |
| Q154S | | LHYPGMNHRVEITEGILADECAALLCTFFR |
| polypeptide | | MPRSVFNAQKKAQSSTDSGGSSGGSSGSET |
| sequence | | PGTSESATPESSGGSSGGSDKKYSIGLAIG |
| | | TNSVGWAVITDEYKVPSKKFKVLGNTDRHS |
| | | IKKNLIGALLFDSGETAEATRLKRTARRRY |
| | | TRRKNRICYLQEIFSNEMAKVDDSFFHRLE |
| | | ESFLVEEDKKHERHPIFGNIVDEVAYHEKY |
| | | PTIYHLRKKLVDSTDKADLRLIYLALAHMI |
| | | KFRGHFLIEGDLNPDNSDVDKLFIQLVQTY |
| | | NQLFEENPINASGVDAKAILSARLSKSRRL |
| | | ENLIAQLPGEKKNGLFGNLIALSLGLTPNF |
| | | KSNFDLAEDAKLQLSKDTYDDDLDNLLAQI |
| | | GDQYADLFLAAKNLSDAILLSDILRVNTEI |
| | | TKAPLSASMIKRYDEHHQDLTLLKALVRQQ |
| | | LPEKYKEIFFDQSKNGYAGYIDGGASQEEF |
| | | YKFIKPILEKMDGTEELLVKLNREDLLRKQ |
| | | RTFDNGSIPHQIHLGELHAILRRQEDFYPF |
| | | LKDNREKIEKILTFRIPYYVGPLARGNSRF |
| | | AWMTRKSEETITPWNFEEWDKGASAQSFIE |
| | | RMTNFDKNLPNEKVLPKHSLLYEYFTVYNE |
| | | LTKVKYVTEGMRKPAFLSGEQKKAIVDLLF |
| | | KTNRKVTVKQLKEDYFKKIECFDSVEISGV |
| | | EDRFNASLGTYHDLLKIIKDKDFLDNEENE |
| | | DILEDIVLTLTLFEDREMIEERLKTYAHLF |
| | | DDKVMKQLKRRRYTGWGRLSRKLINGIRDK |
| | | QSGKTILDFLKSDGFANRNFMQLIHDDSLT |
| | | FKEDIQKAQVSGQGDSLHEHIANLAGSPAI |
| | | KKGILQTVKVVDELVKVMGRHKPENIVIEM |
| | | ARENQTTQKGQKNSRERMKRIEEGIKELGS |
| | | QILKEHPVENTQLQNEKLYLYYLQNGRDMY |
| | | VDQELDINRLSDYDVDHIVPQSFLKDDSID |
| | | NKVLTRSDKNRGKSDNVPSEEVVKKMKNYW |
| | | RQLLNAKLITQRKFDNLTKAERGGLSELDK |
| | | AGFIKRQLVETRQITKHVAQILDSRMNTKY |
| | | DENDKLIREVKVITLKSKLVSDFRKDFQFY |
| | | KVREINNYHHAHDAYLNAVVGTALIKKYPK |
| | | LESEFVYGDYKVYDVRKMIAKSEQEIGKAT |
| | | AKYFFYSNIMNFFKTEITLANGEIRKRPLI |
| | | ETNGETGEIVWDKGRDFATVRKVLSMPQVN |
| | | IVKKTEVQTGGFSKESILPKRNSDKLIARK |
| | | KDWDPKKYGGFVSPTVAYSVLVVAKVEKGK |
| | | SKKLKSVKELLGITIMERSSFEKNPIDFLE |
| | | AKGYKEVKKDLIIKLPKYSLFELENGRKRM |
| | | LASARELQKGNELALPSKYVNFLYLASHYE |
| | | KLKGSPEDNEQKQLFVEQHKHYLDEIIEQI |
| | | SEFSKRVILADANLDKVLSAYNKHRDKPIR |
| | | EQAENIIHLFTLTNLGAPAAFKYFDTTIDR |
| | | KQYRSTKEVLDATLIHQSITGLYETRIDLS |
| | | QLGGDEGADKRTADGSEFESPKKKRKV |
| 13. | 1448 | MSEVEFSHEYWMRHALTLAKRARDEREVPV |
| monoABE8.1_ | | GAVLVLNNRVIGEGWNRAIGLHDPTAHAEI |
| bpN | | MALRQGGLVMQNYRLYDATLYVTFEPCVMC |
| LS | | AGAMIHSRIGRWFGVRNAKTGAAGSLMDVL |
| H123Y123H_ | | HHPGMNHRVEITEGILADECAALLCRFFRM |
| Y147R_ | | PRRVFNAQKKAQSSTDSGGSSGGSSGSETP |
| Q154R_ | | GTSESATPESSGGSSGGSDKKYSIGLAIGT |
| I76Y | | NSVGWAVITDEYKVPSKKFKVLGNTDRHSI |
| polypeptide | | KKNLIGALLFDSGETAEATRLKRTARRRYT |
| sequence | | RRKNRICYLQEIFSNEMAKVDDSFFHRLEE |
| | | SFLVEEDKKHERHPIFGNIVDEVAYHEKYP |
| | | TIYHLRKKLVDSTDKADLRLIYLALAHMIK |
| | | FRGHFLIEGDLNPDNSDVDKLFIQLVQTYN |
| | | QLFEENPINASGVDAKAILSARLSKSRRLE |
| | | NLIAQLPGEKKNGLFGNLIALSLGLTPNFK |
| | | SNFDLAEDAKLQLSKDTYDDDLDNLLAQIG |
| | | DQYADLFLAAKNLSDAILLSDILRVNTEIT |
| | | KAPLSASMIKRYDEHHQDLTLLKALVRQQL |
| | | PEKYKEIFFDQSKNGYAGYIDGGASQEEFY |
| | | KFIKPILEKMDGTEELLVKLNREDLLRKQR |
| | | TFDNGSIPHQIHLGELHAILRRQEDFYPFL |
| | | KDNREKIEKILTFRIPYYVGPLARGNSRFA |
| | | WMTRKSEETITPWNFEEWDKGASAQSFIER |
| | | MTNFDKNLPNEKVLPKHSLLYEYFTVYNEL |
| | | TKVKYVTEGMRKPAFLSGEQKKAIVDLLFK |
| | | TNRKVTVKQLKEDYFKKIECFDSVEISGVE |
| | | DRFNASLGTYHDLLKIIKDKDFLDNEENED |
| | | ILEDIVLTLTLFEDREMIEERLKTYAHLFD |
| | | DKVMKQLKRRRYTGWGRLSRKLINGIRDKQ |
| | | SGKTILDFLKSDGFANRNFMQLIHDDSLTF |
| | | KEDIQKAQVSGQGDSLHEHIANLAGSPAIK |
| | | KGILQTVKVVDELVKVMGRHKPENIVIEMA |
| | | RENQTTQKGQKNSRERMKRIEEGIKELGSQ |
| | | ILKEHPVENTQLQNEKLYLYYLQNGRDMYV |
| | | DQELDINRLSDYDVDHIVPQSFLKDDSIDN |
| | | KVLTRSDKNRGKSDNVPSEEVVKKMKNYWR |
| | | QLLNAKLITQRKFDNLTKAERGGLSELDKA |
| | | GFIKRQLVETRQITKHVAQILDSRMNTKYD |
| | | ENDKLIREVKVITLKSKLVSDFRKDFQFYK |
| | | VREINNYHHAHDAYLNAWGTALIKKYPKLE |
| | | SEFVYGDYKVYDVRKMIAKSEQEIGKATAK |
| | | YFFYSNIMNFFKTEITLANGEIRKRPLIET |
| | | NGETGEIVWDKGRDFATVRKVLSMPQVNIV |
| | | KKTEVQTGGFSKESILPKRNSDKLIARKKD |
| | | WDPKKYGGFVSPTVAYSVLVVAKVEKGKSK |
| | | KLKSVKELLGITIMERSSFEKNPIDFLEAK |
| | | GYKEVKKDLIIKLPKYSLFELENGRKRMLA |
| | | SARELQKGNELALPSKYVNFLYLASHYEKL |
| | | KGSPEDNEQKQLFVEQHKHYLDEIIEQISE |
| | | FSKRVILADANLDKVLSAYNKHRDKPIREQ |
| | | AENIIHLFTLTNLGAPAAFKYFDTTIDRKQ |
| | | YRSTKEVLDATLIHQSITGLYETRIDLSQL |
| | | GGDEGADKRTADGSEFESPKKKRKV |
| 14. | 1449 | MSEVEFSHEYWMRHALTLAKRARDEREVPV |
| monoABE8.1_ | | GAVLVLNNRVIGEGWNRAIGLHDPTAHAEI |
| bpN | | MALRQGGLVMQNYRLIDATLYSTFEPCVMC |
| LS + | | AGAMIHSRIGRVVFGVRNAKTGAAGSLMDV |
| V82S + | | LHYPGMNHRVEITEGILADECAALLCYFFR |
| Q154R | | MPRRVFNAQKKAQSSTDSGGSSGGSSGSET |
| polypeptide | | PGTSESATPESSGGSSGGSDKKYSIGLAIG |
| sequence | | TNSVGWAVITDEYKVPSKKFKVLGNTDRHS |
| | | IKKNLIGALLFDSGETAEATRLKRTARRRY |
| | | TRRKNRICYLQEIFSNEMAKVDDSFFHRLE |
| | | ESFLVEEDKKHERHPIFGNIVDEVAYHEKY |
| | | PTIYHLRKKLVDSTDKADLRLIYLALAHMI |
| | | KFRGHFLIEGDLNPDNSDVDKLFIQLVQTY |
| | | NQLFEENPINASGVDAKAILSARLSKSRRL |
| | | ENLIAQLPGEKKNGLFGNLIALSLGLTPNF |
| | | KSNFDLAEDAKLQLSKDTYDDDLDNLLAQI |
| | | GDQYADLFLAAKNLSDAILLSDILRVNTEI |
| | | TKAPLSASMIKRYDEHHQDLTLLKALVRQQ |
| | | LPEKYKEIFFDQSKNGYAGYIDGGASQEEF |
| | | YKFIKPILEKMDGTEELLVKLNREDLLRKQ |
| | | RTFDNGSIPHQIHLGELHAILRRQEDFYPF |
| | | LKDNREKIEKILTFRIPYYVGPLARGNSRF |
| | | AWMTRKSEETITPWNFEEVVDKGASAQSFI |
| | | ERMTNFDKNLPNEKVLPKHSLLYEYFTVYN |
| | | ELTKVKYVTEGMRKPAFLSGEQKKAIVDLL |
| | | FKTNRKVTVKQLKEDYFKKIECFDSVEISG |
| | | VEDRFNASLGTYHDLLKIIKDKDFLDNEEN |
| | | EDILEDIVLTLTLFEDREMIEERLKTYAHL |
| | | FDDKVMKQLKRRRYTGWGRLSRKLINGIRD |
| | | KQSGKTILDFLKSDGFANRNFMQLIHDDSL |
| | | TFKEDIQKAQVSGQGDSLHEHIANLAGSPA |
| | | IKKGILQTVKVVDELVKVMGRHKPENIVIE |
| | | MARENQTTQKGQKNSRERMKRIEEGIKELG |
| | | SQILKEHPVENTQLQNEKLYLYYLQNGRDM |
| | | YVDQELDINRLSDYDVDHIVPQSFLKDDSI |
| | | DNKVLTRSDKNRGKSDNVPSEEVVKKMKNY |
| | | WRQLLNAKLITQRKFDNLTKAERGGLSELD |
| | | KAGFIKRQLVETRQITKHVAQILDSRMNTK |
| | | YDENDKLIREVKVITLKSKLVSDFRKDFQF |
| | | YKVREINNYHHAHDAYLNAVVGTALIKKYP |
| | | KLESEFVYGDYKVYDVRKMIAKSEQEIGKA |
| | | TAKYFFYSNIMNFFKTEITLANGEIRKRPL |
| | | IETNGETGEIVWDKGRDFATVRKVLSMPQV |
| | | NIVKKTEVQTGGFSKESILPKRNSDKLIAR |
| | | KKDWDPKKYGGFVSPTVAYSVLWAKVEKGK |
| | | SKKLKSVKELLGITIMERSSFEKNPIDFLE |
| | | AKGYKEVKKDLIIKLPKYSLFELENGRKRM |
| | | LASARELQKGNELALPSKYVNFLYLASHYE |
| | | KLKGSPEDNEQKQLFVEQHKHYLDEIIEQI |
| | | SEFSKRVILADANLDKVLSAYNKHRDKPIR |
| | | EQAENIIHLFTLTNLGAPAAFKYFDTTIDR |
| | | KQYRSTKEVLDATLIHQSITGLYETRIDLS |
| | | QLGGDEGADKRTADGSEFESPKKKRKV |
| Linker | 65 | PAPAP |
| Linker | 66 | PAPAPA |
| Linker | 67 | PAPAPAP |
| Linker | 68 | PAPAPAPA |
| Linker | 69 | P(AP)4 |
| Linker | 70 | P(AP)7 |
| Linker | 71 | P(AP)10 |
| N gene | 4001 | atggatgccgacaagattgtattcaaagtc |
| (nucleic | | aataatcaggtggtctctttgaagcctgag |
| acid) | | attatcgtggatcaatatgagtacaagtac |
| | | cctgccatcaaagatttgaaaaagccctgt |
| | | ataaccctaggaaaggctcccgatttaaat |
| | | aaagcatacaagtcagttttgtcaggcatg |
| | | agcgccgccaaacttaatcctgacgatgta |
| | | tgttcctatttggcagcggcaatgcagttt |
| | | tttgaggggacatgtccggaagactggacc |
| | | agctatggaattgtgattgcacgaaaagga |
| | | gataagatcaccccaggttctctggtggag |
| | | ataaaacgtactgatgtagaagggaattgg |
| | | gctctgacaggaggcatggaactgacaaga |
| | | gaccccactgtccctgagcatgcgtcctta |
| | | gtcggtcttctcttgagtctgtataggttg |
| | | agcaaaatatccgggcaaaacactggtaac |
| | | tataagacaaacattgcagacaggatagag |
| | | cagatttttgagacagccccttttgttaaa |
| | | atcgtggaacaccatactctaatgacaact |
| | | cacaaaatgtgtgctaattggagtactata |
| | | ccaaacttcagatttttggccggaacctat |
| | | gacatgtttttctcccggattgagcatcta |
| | | taltcagcaatcagagtgggcacagttgtc |
| | | actgcttatgaagactgttcaggactggta |
| | | tcatttactgggttcataaaacaaatcaat |
| | | ctcaccgctagagaggcaatactatatttc |
| | | ttccacaagaactttgaggaagagataaga |
| | | agaatgttlgagccagggcaggagacagct |
| | | gttcctcactcttatttcatccacttccgt |
| | | tcactaggcttgagtgggaaatctccttat |
| | | tcatcaaatgctgttggtcacgtgttcaat |
| | | ctcattcactttgtaggatgctatatgggt |
| | | caagtcagatccctaaatgcaacggttatt |
| | | gctgcatgtgctcctcatgaaatgtctgtt |
| | | ctagggggctatctgggagaggaattcttc |
| | | gggaaagggacatttgaaagaagattcttc |
| | | agagatgagaaagaacttcaagaatacgag |
| | | gcggctgaactgacaaagactgacgtagca |
| | | ctggcagatgatggaactgtcaactctgac |
| | | gacgaggactacttttcaggtgaaaccaga |
| | | agtccggaggctgtttatactcgaatcatg |
| | | atgaatggaggtcgactaaagagatctcac |
| | | atacggagatatgtctcagtcagttccaat |
| | | catcaagcccgtccaaactcattcgccgag |
| | | tttctaaacaagacatattcgagtgactca |
| N gene | 4002 | MDADKIVFKVNNQVVSLKPEIIVDQYEYKY |
| (amino | | PAIKDLKKPCITLGKAPDLNKAYKSVLSGM |
| acid) | | SAAKLNPDDVCSYLAAAMQFFEGTCPEDWT |
| | | SYGIVIARKGDKITPGSLVEIKRTDVEGNW |
| | | ALTGGMELTRDPTVPEHASLVGLLLSLYRL |
| | | SKISGQNTGNYKTNIADRIEQIFETAPFVK |
| | | IVEHHTLMTTHKMCANWSTIPNFRFLAGTY |
| | | DMFFSRIEHLYSAIRVGTWTAYEDCSGLVS |
| | | FTGFIKQINLTAREAILYFFHKNFEEEIRR |
| | | MFEPGQETAVPHSYFIHFRSLGLSGKSPYS |
| | | SNAVGHVFNLIHFVGCYMGQVRSLNATVIA |
| | | ACAPHEMSVLGGYLGEEFFGKGTFERRFFR |
| | | DEKELQEYEAAELTKTDVALADDGTVNSDD |
| | | EDYFSGETRSPEAVYTRIMMNGGRLKRSHI |
| | | RRYVSVSSNHQARPNSFAEFLNKTYSSDS |
| L gene | 4003 | ctcgatcctggagaggtctatgatgaccct |
| (nucleic | | attgacccaatcgagttagaggctgaaccc |
| acid) | | agaggaacccccattgtccccaacatcttg |
| | | aggaactctgactacaatctcaactctcct |
| | | ttgatagaagatcctgctagactaatgtta |
| | | gaatggttaaaaacagggaatagaccttat |
| | | cggatgactctaacagacaattgctccagg |
| | | tctttcagagttttgaaagattatttcaag |
| | | aaggtagatttgggttctctcaaggtgggc |
| | | ggaatggctgcacagtcaatgatttctctc |
| | | tggttatatggtgcccactctgaatccaac |
| | | aggagccggagatgtataacagacttggcc |
| | | catttctattccaagtcgtcccccatagag |
| | | aagctgttgaatctcacgctaggaaataga |
| | | gggctgagaatccccccagagggagtgtta |
| | | agttgccttgagagggttgattatgataat |
| | | gcatttggaaggtatcttgccaacacgtat |
| | | tcctcttacttgttcttccatgtaatcacc |
| | | ttatacatgaacgccctagactgggatgaa |
| | | gaaaagaccatcctagcattatggaaagat |
| | | ttaacctcagtggacatcgggaaggacttg |
| | | gtaaagttcaaagaccaaatatggggactg |
| | | ctgatcgtgacaaaggactttgtttactcc |
| | | caaagttccaattgtctttttgacagaaac |
| | | tacacacttatgctaaaagatcttttcttg |
| | | tctcgcttcaactccttaatggtcttgctc |
| | | tctcccccagagccccgatactcagatgac |
| | | ttgatatctcaactatgccagctgtacatt |
| | | gctggggatcaagtcttgtctatgtgtgga |
| | | aactccggctatgaagtcatcaaaatattg |
| | | gagccatatgtcgtgaatagtttagtccag |
| | | agagcagaaaagtttaggcctctcattcat |
| | | tccttgggagactttcctgtatttataaaa |
| | | gacaaggtaagtcaacttgaagagacgttc |
| | | ggtccctgtgcaagaaggttctttagggct |
| | | ctggatcaattcgacaacatacatgacttg |
| | | gtttttgtgtttggctgltacaggcattgg |
| | | gggcacccatatatagattatcgaaagggt |
| | | ctgtcaaaactatatgatcaggttcacctt |
| | | aaaaaaatgatagataagtcctaccaggag |
| | | tgcttagcaagcgacctagccaggaggatc |
| | | cttagatggggttttgataagtactccaag |
| | | tggtatctggattcaagattcctagcccga |
| | | gaccaccccttgactccttatatcaaaacc |
| | | caaacatggccacccaaacatattgtagac |
| | | ttggtgggggatacatggcacaagctcccg |
| | | atcacgcagatctttgagattcctgaatca |
| | | atggatccgtcagaaatattggatgacaaa |
| | | tcacattctttcaccagaacgagactagct |
| | | tcttggctgtcagaaaaccgaggggggcct |
| | | gttcctagcgaaaaagttattatcacggcc |
| | | ctgtctaagccgcctgtcaatccccgagag |
| | | tttctgaggtctatagacctcggaggattg |
| | | ccagatgaagacttgataattggcctcaag |
| | | ccaaaggaacgggaattgaagattgaaggt |
| | | cgattctttgctctaatgtcatggaatcta |
| | | agattgtattttgtcatcactgaaaaactc |
| | | ttggccaactacatcttgccactttttgac |
| | | gcgctgactatgacagacaacctgaacaag |
| | | gtgtttaaaaagctgatcgacagggtcacc |
| | | gggcaagggcttttggactattcaagggtc |
| | | acatatgcatttcacctggactatgaaaag |
| | | tggaacaaccatcaaagattagagtcaaca |
| | | gaggatgtattttctgtcctagatcaagtg |
| | | tttggattgaagagagtgttttctagaaca |
| | | cacgagttttttcaaaaggcctggatctat |
| | | tattcagacagatcagacctcatcgggtta |
| | | cgggaggatcaaatatactgcttagatgcg |
| | | tccaacggcccaacctgttggaatggccag |
| | | gatggcgggctagaaggcttacggcagaag |
| | | ggctggagtctagtcagcttattgatgata |
| | | gatagagaatctcaaatcaggaacacaaga |
| | | accaaaatactagctcaaggagacaaccag |
| | | gttttatgtccgacatacatgttgtcgcca |
| | | gggctatctcaagaggggctcctctatgaa |
| | | ttggagagaatatcaaggaatgcactttcg |
| | | atatacagagccgtcgaggaaggggcatct |
| | | aagctagggctgatcatcaagaaagaagag |
| | | accatgtgtagttatgacttcctcatctat |
| | | ggaaaaacccctttgtttagaggtaacata |
| | | ttggtgcctgagtccaaaagatgggccaga |
| | | gtctcttgcgtctctaatgaccaaatagtc |
| | | aacctcgccaatataatgtcgacagtgtcc |
| | | accaatgcgctaacagtggcacaacactct |
| | | caatctttgatcaaaccgatgagggatttt |
| | | ctgctcatgtcagtacaggcagtctttcac |
| | | tacctgctatttagcccaatcttaaaggga |
| | | agagtttacaagattctgagcgctgaaggg |
| | | gagagctttctcctagccatglcaaggata |
| | | atctatctagatccttctttgggagggata |
| | | tctggaatgtccctcggaagattccatata |
| | | cgacagttctcagaccctgtctctgaaggg |
| | | ttatccttctggagagagatctggttaagc |
| | | tcccaagagtcctggattcacgcgttgtgt |
| | | caagaggctggaaacccagatcttggagag |
| | | agaacactcgagagcttcactcgccttcta |
| | | gaagatccgaccaccttaaatatcagagga |
| | | ggggccagtcctaccattctactcaaggat |
| | | gcaatcagaaaggctttatatgacgaggtg |
| | | gacaaggtggaaaatlcagagtttcgagag |
| | | gcaatcctgttgtccaagacccatagagat |
| | | aattttatactcttcttaatatctgttgag |
| | | cctctgtttcctcgatttctcagtgagcta |
| | | ttcagttcgtcttttttgggaatccccgag |
| | | tcaatcattggattgatacaaaactcccga |
| | | acgataagaaggcagtttagaaagagtctc |
| | | tcaaaaactttagaagaatccttctacaac |
| | | tcagagatccacgggattagtcggatgacc |
| | | cagacacctcagagggttgggggggtgtgg |
| | | ccttgctcttcagagagggcagatctactt |
| | | agggagatctcttggggaagaaaagtggta |
| | | ggcacgacagttcctcacccttctgagatg |
| | | ttgggattacttcccaagtcctctatttct |
| | | tgcacttgtggagcaacaggaggaggcaat |
| | | cctagagtttctgtatcagtactcccgtcc |
| | | tttgatcagtcatttttttcacgaggcccc |
| | | ctaaagggatacttgggctcgtccacctct |
| | | atgtcgacccagctattccatgcatgggaa |
| | | aaagtcactaatgttcatgtggtgaagaga |
| | | gctctatcgttaaaagaatctataaactgg |
| | | ttcattactagagattccaacttggctcaa |
| | | gctctaattaggaacattatgtctctgaca |
| | | ggccctgatttccctctagaggaggcccct |
| | | gtcttcaaaaggacggggtcagccttgcat |
| | | aggttcaagtctgccagatacagcgaagga |
| | | gggtattcttctgtctgcccgaacctcctc |
| | | tctcatatttctgttagtacagacaccatg |
| | | tctgatttgacccaagacgggaagaactac |
| | | gatttcatgttccagccattgatgctttat |
| | | gcacagacatggacatcagagctggtacag |
| | | agagacacaaggctaagagactclacgttt |
| | | cattggcacctccgatgcaacaggtgtgtg |
| | | agacccattgacgacgtgaccctggagacc |
| | | tctcagatcttcgagtttccggatgtgtcg |
| | | aaaagaatatccagaatggtttctggggct |
| | | gtgcctcacttccagaggcttcccgatatc |
| | | cgtctgagaccaggagattttgaatctcta |
| | | agcggtagagaaaagtctcaccatatcgga |
| | | tcagctcaggggctcttatactcaatctta |
| | | gtggcaattcacgactcaggatacaatgat |
| | | ggaaccatcttccctgtcaacatatacggc |
| | | aaggtttcccctagagactatttgagaggg |
| | | ctcgcaaggggagtattgataggatcctcg |
| | | atttgcttcttgacaagaatgacaaatatc |
| | | aatattaatagacctcttgaattggtctca |
| | | ggggtaatctcatatattctcctgaggcta |
| | | gataaccatccctccttgtacataatgctc |
| | | agagaaccgtctcttagaggagagatattt |
| | | tctatccctcagaaaatccccgccgcttat |
| | | ccaaccactatgaaagaaggcaacagatca |
| | | atcttgtgttatctccaacatgtgctacgc |
| | | tatgagcgagagataatcacggcgtctcca |
| | | gagaatgactggctatggatcttttcagac |
| | | tttagaagtgccaaaatgacgtacctatcc |
| | | ctcattacttaccagt |
| | | ctcatcttctactccagagggttgagagaa |
| | | acctatctaagagtatgagagataacctgc |
| | | gacaattgagttctttgatgaggcaggtgc |
| | | tgggcgggcacggagaagataccttagagt |
| | | cagacgacaacattcaacgactgctaaaag |
| | | actctttacgaaggacaagatgggtggatc |
| | | aagaggtgcgccatgcagctagaaccatga |
| | | ctggagattacagccccaacaagaaggtgt |
| | | cccgtaaggtaggatgttcagaatgggtct |
| | | gctctgctcaacaggttgcagtctctacct |
| | | cagcaaacccggcccctgtctcggagcttg |
| | | acataagggccctctctaagaggttccaga |
| | | accctttgatctcgggcttgagagtggttc |
| | | agtgggcaaccggtgctcattataagctta |
| | | agcctattctagatgatctcaatgttttcc |
| | | catctctctgccttgtagttggggacgggt |
| | | caggggggatatcaagggcagtcctcaaca |
| | | tgtttccagatgccaagcttgtgttcaaca |
| | | gtcttttagaggtgaatgacctgatggctt |
| | | ccggaacacatccactgcctccttcagcaa |
| | | tcatgaggggaggaaatgatatcgtctcca |
| | | gagtgatagatcttgactcaatctgggaaa |
| | | aaccgtccgacttgagaaacttggcaacct |
| | | ggaaatacttccagtcagtccaaaagcagg |
| | | tcaacatgtcctatgacctcattatttgcg |
| | | atgcagaagttactgacattgcatctatca |
| | | accggatcaccctgttaatgtccgattttg |
| | | cattgtctatagatggaccactctatttgg |
| | | tcttcaaaacttatgggactatgctagtaa |
| | | atccaaactacaaggctattcaacacctgt |
| | | caagagcgttcccctcggtcacagggttta |
| | | tcacccaagtaacttcgtctttttcatctg |
| | | agctctacctccgattctccaaacgaggga |
| | | agtttttcagagatgctgagtacttgacct |
| | | cttccacccttcgagaaatgagccttgtgt |
| | | tattcaattgtagcagccccaagagtgaga |
| | | tgcagagagctcgttccttgaactatcagg |
| | | atcttgtgagaggatttcctgaagaaatca |
| | | tatcaaatccttacaatgagatgatcataa |
| | | ctctgattgacagtgatgtagaatcttttc |
| | | tagtccacaagatggttgatgatcttgagt |
| | | tacagaggggaactctgtctaaagtggcta |
| | | tcattatagccatcatgatagttttctcca |
| | | acagagtcttcaacgtttccaaacccctaa |
| | | ctgacccctcgttctatccaccgtctgatc |
| | | ccaaaatcctgaggcacttcaacatatgtt |
| | | gcaglactatgatgtatctatctactgctt |
| | | taggtgacgtccctagcttcgcaagacttc |
| | | acgacctgtataacagacctataacttatt |
| | | acttcagaaagcaagtcattcgagggaacg |
| | | tttatctatcttggagttggtccaacgaca |
| | | cctcagtgttcaaaagggtagcctgtaatt |
| | | ctagcctgagtctgtcatctcactggatca |
| | | ggttgatttacaagatagtgaagactacca |
| | | gactcgttggcagcatcaaggatctatcca |
| | | gagaagtggaaagacaccttcataggtaca |
| | | acaggtggatcaccctagaggatatcagat |
| | | ctagatcatccctactagactacagttgcc |
| | | tg |
| L gene | 4004 | LDPGEVYDDPIDPIELEAEPRGTPIVPNIL |
| (amino | | RNSDYNLNSPLIEDPARLMLEWLKTGNRPY |
| acid) | | RMTLTDNCSRSFRVLKDYFKKVDLGSLKVG |
| | | GMAAQSMISLWLYGAHSESNRSRRCITDLA |
| | | HFYSKSSPIEKLLNLTLGNRGLRIPPEGVL |
| | | SCLERVDYDNAFGRYLANTYSSYLFFHVIT |
| | | LYMNALDWDEEKTILALWKDLTSVDIGKDL |
| | | VKFKDQIWGLLIVTKDFVYSQSSNCLFDRN |
| | | YTLMLKDLFLSRFNSLMVLLSPPEPRYSDD |
| | | LISQLCQLYIAGDQVLSMCGNSGYEVIKIL |
| | | EPYVVNSLVQRAEKFRPLIHSLGDFPVFIK |
| | | DKVSQLEETFGPCARRFFRALDQFDNIHDL |
| | | VFVFGCYRHWGHPYIDYRKGLSKLYDQVHL |
| | | KKMIDKSYQECLASDLARRILRWGFDKYSK |
| | | WYLDSRFLARDHPLTPYIKTQTWPPKHIVD |
| | | LVGDTWHKLPITQIFEIPESMDPSEILDDK |
| | | SHSFTRTRLASWLSENRGGPVPSEKVIITA |
| | | LSKPPVNPREFLRSIDLGGLPDEDLIIGLK |
| | | PKERELKIEGRFFALMSWNLRLYFVITEKL |
| | | LANYILPLFDALTMTDNLNKVFKKLIDRVT |
| | | GQGLLDYSRVTYAFHLDYEKWNNHQRLEST |
| | | EDVFSVLDQVFGLKRVFSRTHEFFQKAWIY |
| | | YSDRSDLIGLREDQIYCLDASNGPTCWNGQ |
| | | DGGLEGLRQKGWSLVSLLMIDRESQIRNTR |
| | | TKILAQGDNQVLCPTYMLSPGLSQEGLLYE |
| | | LERISRNALSIYRAVEEGASKLGLIIKKEE |
| | | TMCSYDFLIYGKTPLFRGNILVPESKRWAR |
| | | VSCVSNDQIVNLANIMSTVSTNALTVAQHS |
| | | QSLIKPMRDFLLMSVQAVFHYLLFSPILKG |
| | | RVYKILSAEGESFLLAMSRIIYLDPSLGGI |
| | | SGMSLGRFHIRQFSDPVSEGLSFWREIWLS |
| | | SQESWIHALCQEAGNPDLGERTLESFTRLL |
| | | EDPTTLNIRGGASPTILLKDAIRKALYDEV |
| | | DKVENSEFREAILLSKTHRDNFILFLISVE |
| | | PLFPRFLSELFSSSFLGIPESIIGLIQNSR |
| | | TIRRQFRKSLSKTLEESFYNSEIHGISRMT |
| | | QTPQRVGGVWPCSSERADLLREISWGRKWG |
| | | TTVPHPSEMLGLLPKSSISCTCGATGGGNP |
| | | RVSVSVLPSFDQSFFSRGPLKGYLGSSTSM |
| | | STQLFHAWEKVTNVHVVKRALSLKESINWF |
| | | ITRDSNLAQALIRNIMSLTGPDFPLEEAPV |
| | | FKRTGSALHRFKSARYSEGGYSSVCPNLLS |
| | | HISVSTDTMSDLTQDGKNYDFMFQPLMLYA |
| | | QTWTSELVQRDTRLRDSTFHWHLRCNRCVR |
| | | PIDDVTLETSQIFEFPDVSKRISRMVSGAV |
| | | PHFQRLPDIRLRPGDFESLSGREKSHHIGS |
| | | AQGLLYSILVAIHDSGYNDGTIFPVNIYGK |
| | | VSPRDYLRGLARGVLIGSSICFLTRMTNIN |
| | | INRPLELVSGVISYILLRLDNHPSLYIMLR |
| | | EPSLRGEIFSIPQKIPAAYPTTMKEGNRSI |
| | | LC |
| | | YLQHVLRYEREIITASPENDWLWIFSDFRS |
| | | AKMTYLSLITYQSHLLLQRVERNLSKSMRD |
| | | NLRQLSSLMRQVLGGHGEDTLESDDNIQRL |
| | | LKDSLRRTRWVDQEVRHAARTMTGDYSPNK |
| | | KVSRKVGCSEWVCSAQQVAVSTSANPAPVS |
| | | ELDIRALSKRFQNPLISGLRWQWATGAHYK |
| | | LKPILDDLNVFPSLCLWGDGSGGISRAVLN |
| | | MFPDAKLVFNSLLEVNDLMASGTHPLPPSA |
| | | IMRGGNDIVSRVIDLDSIWEKPSDLRNLAT |
| | | WKYFQSVQKQVNMSYDLIICDAEVTDIASI |
| | | NRITLLMSDFALSIDGPLYLVFKTYGTMLV |
| | | NPNYKAIQHLSRAFPSVTGFITQVTSSFSS |
| | | ELYLRFSKRGKFFRDAEYLTSSTLREMSLV |
| | | LFNCSSPKSEMQRARSLNYQDLVRGFPEEI |
| | | ISNPYNEMIITLIDSDVESFLVHKMVDDLE |
| | | LQRGTLSKVAIIIAIMIVFSNRVFNVSKPL |
| | | TDPSFYPPSDPKILRHFNICCSTMMYLSTA |
| | | LGDVPSFARLHDLYNRPITYYFRKQVIRGN |
| | | VYLSWSWSNDTSVFKRVACNSSLSLSSHWI |
| | | RLIYKIVKTTRLVGSIKDLSREVERHLHRY |
| | | NRWITLEDIRSRSSLLDYSCL |
| M gene | 4005 | ttctagaagcagagaggaatctttgtcctc |
| (nucleic | | ttcggacctttgtgtctgaagagacatgtc |
| acid) | | agaccatagttgacatgctctcgggttcat |
| | | gttgatacaccagactctgccctggatatg |
| | | acactgttttgcaatcactcttatttgcaa |
| | | tccgacgaactcagtatcatcatcccaagt |
| | | gatctcctgagagtattccaactcctcccc |
| | | ltcaagagggcccctggaatcagcccactg |
| | | gaagataaaggttctcctcaatttgtatac |
| | | ccagttcaggccctcagggactggagatcc |
| | | tgacaaagccagtccaataaccactttgac |
| | | taacccgatcatcctatgattcccagaata |
| | | tatctcgtcgaatgatttcagaatgtgccg |
| | | caggatcctgaacgagtaaccattcgggct |
| | | acacactttaacccttccgttgatacaaaa |
| | | gttcctcatgttcttcttgcctgtaagttc |
| | | tttcagcgggacgtattcagggggtggaag |
| | | ccacaagtcatcgtcatccagaggggctga |
| | | cgcgggagaggatttttgagtgtcctcgtc |
| | | cctgcggtttttcactatcttacgtaggag |
| | | gtt |
| M gene | 4006 | NLLRKIVKNRRDEDTQKSSPASAPLDDDDL |
| (amino | | WLPPPEYVPLKELTGKKNMRNFCINGRVKV |
| acid) | | CSPNGYSFRILRHILKSFDEIYSGNHRMIG |
| | | LVKVVIGLALSGSPVPEGLNWVYKLRRTFI |
| | | FQWADSRGPLEGEELEYSQEITWDDDTEFV |
| | | GLQIRVIAKQCHIQGRVWCINMNPRACQLW |
| | | SDMSLQTQRSEEDKDSSLLLE |
| P gene | 4007 | agcaagalctttgtcaatcctagtgctatt |
| (nucleic | | agagccggtctggccgatcttgagatggct |
| acid) | | gaagaaactgttgatctgatcaatagaaat |
| | | atcgaagacaatcaggctcatctccaaggg |
| | | gaacccatagaggtggacaatctccctgag |
| | | gatatggggcgacttcacctggatgatgga |
| | | aaatcgcccaaccatggtgagatagccaag |
| | | gtgggagaaggcaagtatcgagaggacttt |
| | | cagatggatgaaggagaggatcctagcttc |
| | | ctgttccagtcatacctggaaaatgttgga |
| | | gtccaaatagtcagacaaatgaggtcagga |
| | | gagagatttctcaagatatggtcacagacc |
| | | gtagaagagattatatcctatgtcgcggtc |
| | | aactttcccaaccctccaggaaagtcttca |
| | | gaggataaatcaacccagactactggccga |
| | | gagctcaagaaggagacaacacccactcct |
| | | tctcagagagaaagccaatcatcgaaagcc |
| | | aggatggcggctcaaattgcttctggccct |
| | | ccagcccttgaatggtcggctaccaatgaa |
| | | gaggatgatctatcagtggaggctgagatc |
| | | gctcaccagattgcagaaagtttctccaaa |
| | | aaatataagtttccctctcgatcctcaggg |
| | | atactcttgtataattttgagcaattgaaa |
| | | atgaaccttgatgatatagttaaagaggca |
| | | aaaaatgtaccaggtgtgacccgtttagcc |
| | | catgacgggtccaaactccccctaagatgt |
| | | gtactgggatgggtcgctttggccaactct |
| | | aagaaattccagttgttagtcgaatccgac |
| | | aagctgagtaaaatcatgcaagatgacttg |
| | | aatcgctatacatcttgc |
| P gene | 4008 | SKIFVNPSAIRAGLADLEMAEETVDLINRN |
| (amino | | IEDNQAHLQGEPIEVDNLPEDMGRLHLDDG |
| acid) | | KSPNHGEIAKVGEGKYREDFQMDEGEDPSF |
| | | LFQSYLENVGVQIVRQMRSGERFLKIWSQT |
| | | VEEIISYVAVNFPNPPGKSSEDKSTQTTGR |
| | | ELKKETTPTPSQRESQSSKARMAAQIASGP |
| | | PALEWSATNEEDDLSVEAEIAHQIAESFSK |
| | | KYKFPSRSSGILLYNFEQLKMNLDDIVKEA |
| | | KNVPGVTRLAHDGSKLPLRCVLGWVALANS |
| | | KKFQLLVESDKLSKIMQDDLNRYTSC |
| G gene | 4009 | atggttcctcaggctctcctgtttgtaccc |
| (nucleic | | cttctggtttttccattgtgttttgggaaa |
| acid) | | ttccctatttacacgataccagacaagctt |
| | | ggtccctggagtccgattgacatacatcac |
| | | ctcagctgcccaaacaatttggtagtggag |
| | | gacgaaggatgcaccaacctgtcagggttc |
| | | tcctacatggaacttaaagttggatacatc |
| | | ttagccataaaagtgaacgggttcacttgc |
| | | acaggcgttgtgacggaggctgaaacctac |
| | | actaacttcgttggttatgtcacaaccacg |
| | | ttcaaaagaaagcatttccgcccaacacca |
| | | gatgcatgtagagccgcgtacaactggaag |
| | | atggccggtgaccccagatatgaagagtct |
| | | ctacacaatccgtaccctgactaccgctgg |
| | | cttcgaactgtaaaaaccaccaaggagtct |
| | | ctcgttatcatatctccaagtgtggcagat |
| | | ttggacccatatgacagatcccttcactcg |
| | | agggtcttccctagcgggaagtgctcagga |
| | | gtagcggtgtcttctacctactgctccact |
| | | aaccacgattacacca |
| | | tttggatgcccgagaatccgagactaggga |
| | | tgtcttgtgacatttttaccaatagtagag |
| | | ggaagagagcatccaaagggagtgagactt |
| | | gcggctttgtagatgaaagaggcctatata |
| | | agtctttaaaaggagcatgcaaactcaagt |
| | | tatgtggagttctaggacttagacttatgg |
| | | atggaacatgggtctcgatgcaaacatcaa |
| | | atgaaaccaaatggtgccctcccgataagt |
| | | tggtgaacctgcacgactttcgctcagacg |
| | | aaattgagcaccttgttgtagaggagttgg |
| | | tcaggaagagagaggagtgtctggatgcac |
| | | tagagtccatcatgacaaccaagtcagtga |
| | | gtttcagacgtctcagtcatttaagaaaac |
| | | ttgtccctgggtttggaaaagcatatacca |
| | | tattcaacaagaccttgatggaagccgatg |
| | | ctcactacaagtcagtcagaacttggaatg |
| | | agatcctcccttcaaaagggtgtttaagag |
| | | ttggggggaggtgtcatcctcatgtgaacg |
| | | gggtgtttttcaatggtataatattaggac |
| | | ctgacggcaatgtcttaatcccagagatgc |
| | | aatcatccctcctccagcaacatatggagt |
| | | tgttggaatcctcggttatcccccttgtgc |
| | | accccctggcagacccgtctaccgttttca |
| | | aggacggtgacgaggctgaggattttgttg |
| | | aagttcaccttcccgatgtgcacaatcagg |
| | | tctcaggagttgacttgggtctcccgaact |
| | | gggggaagtatgtattactgagtgcagggg |
| | | ccctgactgccttgatgttgataattttcc |
| | | tgatgacatgttgtagaagagtcaatcgat |
| | | cagaacctacgcaacacaatctcagaggga |
| | | cagggagggaggtgtcagtcactccccaaa |
| | | gcgggaagatcatatcttcatgggaatcac |
| | | acaagagtgggggtgagaccagactg |
| G gene | 4010 | MVPQALLFVPLLVFPLCFGKFPIYTIPDKL |
| (amino | | GPWSPIDIHHLSCPNNLVVEDEGCTNLSGF |
| acid) | | SYMELKVGYILAiKVNGFTCTGVVTEAETY |
| | | TNFVGYVTTTFKRKHFRPTPDACRAAYNWK |
| | | MAGDPRYEESLHNPYPDYRWLRTVKTTKES |
| | | LVIISPSVADLDPYDRSLHSRVFPSGKCSG |
| | | VAVSSTYCSTNHDYTIWMPENPRLGMSCDI |
| | | FTNSRGKRASKGSETCGFVDERGLYKSLKG |
| | | ACKLKLCGVLGLRLMDGTWVSMQTSNETKW |
| | | CPPDKLVNLHDFRSDEIEHLVVEELVRKRE |
| | | ECLDALESIMTTKSVSFRRLSHLRKLVPGF |
| | | GKAYTIFNKTLMEADAHYKSVRTWNEILPS |
| | | KGCLRVGGRCHPHVNGVFFNGIILGPDGNV |
| | | LIPEMQSSLLQQHMELLESSVIPLVHPLAD |
| | | PSTVFKDGDEAEDFVEVHLPDVHNQVSGVD |
| | | LGLPNWGKYVLLSAGALTALMLIIFLMTCC |
| | | RRVNRSEPTQHNLRGTGREVSVTPQSGKII |
| | | SSWESHKSGGETRL |
| HEK2-2 | 4011 | gaacacaaagcatagactgc |
| target | | |
| ABCA4 | 4012 | tgtcggagttcgccctggag |
| target | | |

1. A recombinant rabies virus genome, comprising a nucleic acid encoding a therapeutic transgene, wherein:
the genome lacks a G gene encoding for a rabies virus glycoprotein or a functional variant thereof; and/or
the genome lacks an L gene encoding for a rabies virus polymerase or a functional variant thereof.

2. The recombinant genome of claim 1, wherein the genome lacks a G gene encoding for a rabies virus glycoprotein or a functional variant thereof, optionally wherein the genome further lacks an L gene encoding for a rabies virus polymerase or a functional variant thereof.

3. (canceled)

4. The recombinant genome of claim 1, wherein:
the genome comprises:
an N gene encoding for a rabies virus nucleoprotein or a functional variant thereof;
a P gene encoding for a rabies virus phosphoprotein or a functional variant thereof; and
an M gene encoding for a rabies virus matrix protein or a functional variant thereof or the genome lacks;
an N gene encoding for a rabies virus nucleoprotein or a functional variant thereof;
a P gene encoding for a rabies virus phosphoprotein or a functional variant thereof; and/or
an M gene encoding for a rabies virus matrix protein or a functional variant thereof.

5. (canceled)

6. A recombinant rabies virus particle, comprising a rabies virus glycoprotein and the recombinant rabies virus genome of claim 1.

7. A recombinant rabies virus particle, comprising:
a rabies virus glycoprotein; and
a recombinant rabies virus genome comprising a nucleic acid encoding a therapeutic transgene, wherein:
the genome lacks a G gene encoding for a rabies virus glycoprotein or a functional variant thereof; and/or
the genome lacks an L gene encoding for a rabies virus polymerase or a functional variant thereof.

8-11. (canceled)

12. The recombinant virus particle of claim 7, wherein the recombinant rabies virus is replication incompetent and/or replication deficient.

13. (canceled)

14. The recombinant genome of claim 1, wherein each of the genes are operably linked to a transcriptional regulatory element, optionally wherein:
the transcriptional regulatory element comprises a transcription initiation signal, optionally wherein the transcription initiation signal is exogenous or endogenous to the rabies virus; and/or
each of the genes are operably linked to a transcription termination polyadenylation signal.

15-18. (canceled)

19. The recombinant genome of claim 1, wherein the therapeutic transgene comprises a sequence that encodes a nucleic acid editing system or a component thereof, optionally wherein the nucleic acid editing system or component thereof comprises a Clustered Regulatory Interspaced Short Palindromic Repeat (CRISPR) system, a zinc finger nuclease (ZFN), a meganuclease, and a Transcription Activator-Like Effector-based Nucleases (TALEN).

20-21. (canceled)

22. The recombinant genome of claim 19, wherein the CRISPR-system comprises a nucleobase editor comprising a polynucleotide programmable nucleotide binding domain and a nucleobase editing domain, optionally wherein the nucleobase editing domain comprises an adenosine deaminase, cytidine deaminase, or a functional variant thereof, optionally wherein:
the adenosine deaminase comprises a TadA deaminase from any of the adenosine base editors recited in Table 10, Table 11, Table 12, Table 13, Table 14, or Table 15;
the nucleobase editing domain comprises a adenosine deaminase from any one of the adenosine base editors of: ABE 0.1, ABE 0.2, ABE 1.1, ABE 1.2, ABE2.1, ABE2.2, ABE2.3, ABE2.4, ABE2.5, ABE2.6, ABE2.7, ABE2.8, ABE2.9, ABE2.10, ABE2.11, ABE2.12, ABE3.1, ABE3.2, ABE3.3, ABE3.4, ABE3.5, ABE3.6, ABE3.7, ABE3.8, ABE4.1, ABE4.2, ABE4.3, ABE5.1, ABE5.2, ABE5.3, ABE5.4, ABE5.5, ABE5.6, ABE5.7, ABE5.8, ABE5.9, ABE5.10, ABE5.11, ABE5.12, ABE5.13, ABE5.14, ABE6.1, ABE6.2, ABE6.3, ABE6.4, ABE6.5, ABE6.6, ABE7.1, ABE7.2, ABE7.3, ABE7.4, ABE7.5, ABE7.6, ABE7.7, ABE7.8, ABE 7.9, ABE7.10, ABE8.1-m, ABE8.2-m, ABE8.3-m, ABE8.4-m, ABE8.5-m, ABE8.6-m, ABE8.7-m, ABE8.8-m, ABE8.9-m, ABE8.10-m, ABE8.11-m, ABE8.12-m, ABE8.13-m, ABE8.14-m, ABE8.15-m, ABE8.16-m, ABE8.17-m, ABE8.18-m, ABE8.19-m, ABE8.20-m, ABE8.21-m, ABE8.22-m, ABE8.23-m, ABE8.24-m, ABE8.1-d, ABE8.2-d, ABE8.3-d, ABE8.4-d, ABE8.5-d, ABE8.6-d, ABE8.7-d, ABE8.8-d, ABE8.9-d, ABE8.10-d, ABE8.11-d, ABE8.12-d, ABE8.13-d, ABE8.14-d, ABE8.15-d, ABE8.16-d, ABE8.17-d, ABE8.18-d, ABE8.19-d, ABE8.20-d, ABE8.21-d, ABE8.22-d, ABE8.23-d, ABE8.24-d, ABE8a-m, ABE8b-m, ABE8c-m, ABE8d-m, ABE8e-m, ABE8a-d, ABE8b-d, ABE8c-d, ABE8d-d, ABE8e-d, ABE9.1, ABE9.2, ABE9.3, ABE9.4, ABE9.5, ABE9.6, ABE9.7, ABE9.8, ABE9.9, ABE9.10, ABE9.11, ABE9.12, ABE9.13, ABE9.14, ABE9.15, ABE9.16, ABE9.17, ABE9.18, ABE9.19, ABE9.2, ABE9.21, ABE9.22, ABE9.23, ABE9.24, ABE9.25, ABE9.26, ABE9.27, ABE9.28, ABE9.29, ABE9.30, ABE9.31, ABE9.32, ABE9.33, ABE9.34, ABE9.35, ABE9.36, ABE9.37, ABE9.38, ABE9.39, ABE9.40, ABE9.41, ABE9.42, ABE9.43, ABE9.44, ABE9.45, ABE9.46, ABE9.47, ABE9.48, ABE9.49, ABE9.50, ABE9.51, ABE9.52, ABE9.53, ABE9.54, ABE9.55, ABE9.56, ABE9.57, and ABE9.58; or
the cytidine deaminase is selected from the group consisting of: Petromyzon marinus cytosine deaminase 1 (PmCDA1), Activation-induced cytidine deaminase (AID), and APOBEC.

23-38. (canceled)

39. The recombinant genome of claim 1, wherein the nucleic acid encoding the therapeutic transgene is greater than: about 300 bp, about 400 bp, about 500 bp, about 600 bp, about 700 bp, about 800 bp, about 900 bp, about 1,000 bp, about 1,100 bp, about 1,200 bp, about 1,300 bp, about 1,400 bp, about 1,500 bp, about 1,600 bp, about 1,700 bp, about 1,800 bp, about 1,900 bp, about 2,000 bp, about 2,100 bp, about 2,200 bp, about 2,300 bp, about 2,400 bp, about 2,500 bp, about 2,600 bp, about 2,700 bp, about 2,800 bp, about 2,900 bp, or about 3,000 bp.

40-42. (canceled)

43. The recombinant genome or claim 1, wherein the nucleic acid encoding the therapeutic transgene is greater than about 3,000 bp, greater than about 4,500 bp, greater than about 8,500 bp, or greater than about 10,000 bp.

44-51. (canceled)

52. A pharmaceutical composition comprising the recombinant virus particle of claim 6.

53. A method for expressing a therapeutic transgene in a target cell, comprising transducing a target cell with the recombinant virus particle claim 6.

54. A method for expressing a nucleobase editor in a target cell, comprising transducing a target cell with a recombinant rabies virus particle, wherein the recombinant virus particle comprises:
a rabies virus glycoprotein or variant thereof; and
a recombinant rabies virus genome comprising a nucleic acid encoding a nucleobase editor comprising a polynucleotide programmable nucleotide binding domain and a nucleobase editing domain, wherein:
the genome lacks a G gene encoding for a rabies virus glycoprotein or a functional variant thereof; and/or
the genome lacks an L gene encoding for a rabies virus polymerase or a functional variant thereof.

55. The method of claim 54, wherein:
the genome comprises:
an N gene encoding for a rabies virus nucleoprotein or a functional variant thereof;
a P gene encoding for a rabies virus phosphoprotein or a functional variant thereof; and
an M gene encoding for a rabies virus matrix protein or a functional variant thereof; or
the genome lacks:
an N gene encoding for a rabies virus nucleoprotein or a functional variant thereof;
a P gene encoding for a rabies virus phosphoprotein or a functional variant thereof; and/or
an M gene encoding for a rabies virus matrix protein or a functional variant thereof.

56-61. (canceled)

62. The method of claim 54, wherein the nucleobase editing domain comprises an adenosine deaminase, cytidine deaminase, or a functional variant thereof, optionally wherein:
the adenosine deaminase comprises a TadA deaminase from any of the adenosine base editors recited in Table 10, Table 11, Table 12, Table 13, Table 14, or Table 15;
the nucleobase editing domain comprises a adenosine deaminase from any one of the adenosine base editors of: ABE 0.1, ABE 0.2, ABE 1.1, ABE 1.2, ABE2.1, ABE2.2, ABE2.3, ABE2.4, ABE2.5, ABE2.6, ABE2.7, ABE2.8, ABE2.9, ABE2.10, ABE2.11, ABE2.12, ABE3.1, ABE3.2, ABE3.3, ABE3.4, ABE3.5, ABE3.6, ABE3.7, ABE3.8, ABE4.1, ABE4.2, ABE4.3, ABE5.1, ABE5.2, ABE5.3, ABE5.4, ABE5.5, ABE5.6, ABE5.7, ABE5.8, ABE5.9, ABE5.10, ABE5.11, ABE5.12, ABE5.13, ABE5.14, ABE6.1, ABE6.2, ABE6.3, ABE6.4, ABE6.5, ABE6.6, ABE7.1, ABE7.2, ABE7.3, ABE7.4, ABE7.5, ABE7.6, ABE7.7, ABE7.8, ABE 7.9, ABE7.10, ABE8.1-m, ABE8.2-m, ABE8.3-m, ABE8.4-m, ABE8.5-m, ABE8.6-m, ABE8.7-m, ABE8.8-m, ABE8.9-m, ABE8.10-m, ABE8.11-m, ABE8.12-m, ABE8.13-m, ABE8.14-m, ABE8.15-m, ABE8.16-m, ABE8.17-m, ABE8.18-m, ABE8.19-m, ABE8.20-m, ABE8.21-m, ABE8.22-m, ABE8.23-m, ABE8.24-m, ABE8.1-d, ABE8.2-d, ABE8.3-d, ABE8.4-d, ABE8.5-d, ABE8.6-d, ABE8.7-d, ABE8.8-d, ABE8.9-d, ABE8.10-d, ABE8.11-d, ABE8.12-d, ABE8.13-d, ABE8.14-d, ABE8.15-d, ABE8.16-d, ABE8.17-d, ABE8.18-d, ABE8.19-d, ABE8.20-d, ABE8.21-d, ABE8.22-d, ABE8.23-d, ABE8.24-d, ABE8a-m, ABE8b-m, ABE8c-m, ABE8d-m, ABE8e-m, ABE8a-d, ABE8b-d, ABE8c-d, ABE8d-d, ABE8e-d, ABE9.1, ABE9.2, ABE9.3, ABE9.4, ABE9.5, ABE9.6, ABE9.7, ABE9.8, ABE9.9, ABE9.10, ABE9.11, ABE9.12, ABE9.13, ABE9.14, ABE9.15, ABE9.16, ABE9.17, ABE9.18, ABE9.19, ABE9.2, ABE9.21, ABE9.22, ABE9.23, ABE9.24, ABE9.25, ABE9.26, ABE9.27, ABE9.28, ABE9.29, ABE9.30, ABE9.31, ABE9.32, ABE9.33, ABE9.34, ABE9.35, ABE9.36, ABE9.37, ABE9.38, ABE9.39, ABE9.40, ABE9.41, ABE9.42, ABE9.43, ABE9.44, ABE9.45, ABE9.46, ABE9.47, ABE9.48, ABE9.49, ABE9.50, ABE9.51, ABE9.52, ABE9.53, ABE9.54, ABE9.55, ABE9.56, ABE9.57, and ABE9.58; or
the cytidine deaminase is selected from the group consisting of: Petromyzon marinus cytosine deaminase 1 (PmCDA1), Activation-induced cytidine deaminase (AID), and APOBEC.

63-69. (canceled)

70. The method of claim 54, wherein:
the polynucleotide programmable nucleotide binding domain comprises a Cas9 polypeptide, a Cas12 polypeptide, or a functional variant thereof; and/or
the recombinant genome further comprises a nucleic acid sequence encoding a guide RNA (gRNA) or a guide RNA (gRNA) is provided to the target cell exogenously.

71-82. (canceled)

83. A method for delivering a therapeutic transgene to a subject, comprising administering to the subject the recombinant virus particle of claim 6.

84-100. (canceled)

101. A packaging system for the recombinant preparation of a rabies virus particle, wherein the packaging system comprises:
an N gene encoding for a rabies virus nucleoprotein or a functional variant thereof;
a P gene encoding for a rabies virus phosphoprotein or a functional variant thereof;
an L gene encoding for a rabies virus polymerase or a functional variant thereof; and
a recombinant rabies virus genome, wherein:
the genome lacks a G gene encoding for a rabies virus glycoprotein or a functional variant thereof; and/or
the genome lacks an L gene encoding for a rabies virus polymerase or a functional variant thereof.

102-103. (canceled)

104. The packaging system of claim 101, wherein the N, P, and L genes are each comprised within a separate vector, optionally wherein each of the N, P, and L genes are operably linked to a transcriptional regulatory element.

105-109. (canceled)

110. The packaging system of claim 101, wherein the N, P, and L genes are comprised within a single vector, optionally wherein the single vector comprises a first expression cassette comprising the N and P genes, and a second expression cassette comprising the L gene.

111. (canceled)

112. The packaging system of claim 110, wherein:
the first expression cassette comprises from 5′ to 3′:
a transcriptional regulatory element;
the P gene; and
the N gene; or
the first expression cassette comprises from 5′ to 3′:
a transcriptional regulatory element;
the P gene;
a ribosomal skipping element; and
the N gene.

113-115. (canceled)

116. The packaging system of claim 110, wherein the second expression cassette comprises from 5′ to 3′:
a transcriptional regulatory element; and
the L gene.

117-131. (canceled)

132. A method for producing a recombinant rabies virus particle, the method comprising introducing the packaging system of claim 101 into a cell under conditions operative for enveloping the recombinant rabies virus genome to form the recombinant rabies virus particle.

133. (canceled)

134. A recombinant rabies virus particle packaging cell comprising the packaging system of claim 101.

135. A recombinant rabies virus particle packaging cell, comprising:
an N gene encoding for a rabies virus nucleoprotein or a functional variant thereof;
a P gene encoding for a rabies virus phosphoprotein or a functional variant thereof; and
an L gene encoding for a rabies virus polymerase or a functional variant thereof.

136. The packaging cell of claim 135, wherein a first expression cassette comprises the N and P genes, optionally wherein:
the first expression cassette comprises from 5′ to 3′:
a transcriptional regulatory element;
the P gene; and
the N gene; or
the first expression cassette comprises from 5′ to 3′:
a transcriptional regulatory element;
the P gene;
a ribosomal skipping element; and
the N gene.

137-152. (canceled)

153. A method for producing a recombinant rabies virus, the method comprising introducing into the packaging cell of claim 134, a nucleic acid comprising a recombinant rabies virus genome comprising a nucleic acid comprising a therapeutic transgene, under conditions operative for enclosing the recombinant rabies virus genome in the glycoprotein to form the recombinant rabies virus, wherein:
the genome lacks an endogenous G gene encoding for a rabies virus glycoprotein; and
the genome lacks an endogenous L gene encoding for a rabies virus polymerase.

154-159. (canceled)

160. The method of claim 153, wherein the recombinant rabies virus titer is greater than about 1E8 TU/mL, optionally wherein the recombinant rabies virus titer is from about 1E8 TU/mL to about 1E9 TU/mL.

161. (canceled)

162. A method of treating a disease or disorder in a subject, the method comprising administering the recombinant rabies virus particle of claim 6 to the subject, optionally wherein the disease or disorder is a neurologic disease or disorder or an ophthalmic disease or disorder.

163-165. (canceled)

The application's sequence listing, which the Patent Office published only in electronic form, follows.

SEQUENCE LISTING (4039 sequences)

SEQ ID NO: 1-7 - skipped (7 entries)

SEQ ID NO: 8 - protein, 167 aa, Artificial Sequence
  Description of Artificial Sequence: Synthetic polypeptide
MSEVEFSHEYWMRHALTLAKRARDEREVPVGAVLVLNNRVIGEGWNRAIGLHDPTAHAEIMALRQGGLVMQNYRLIDATLYVTFEPCVMCAGAMIHSRIGRVVFGVRNAKTGAAGSLMDVLHYPGMNHRVEITEGILADECAALLCYFFRMPRQVFNAQKKAQSSTD

SEQ ID NO: 9-11 - skipped (3 entries)

SEQ ID NO: 12 - protein, 167 aa, Artificial Sequence
  Description of Artificial Sequence: Synthetic polypeptide
MSEVEFSHEYWMRHALTLAKRARDEREVPVGAVLVLNNRVIGEGWNRAIGLHDPTAHAEIMALRQGGLVMQNYRLIDATLYVTFEPCVMCAGAMIHSRIGRVVFGVRNAKTGAAGSLMDVLHYPGMNHRVEITEGILADECAALLCTFFRMPRQVFNAQKKAQSSTD

SEQ ID NO: 13-40 - skipped (28 entries)

SEQ ID NO: 41 - protein, 208 aa, Petromyzon marinus
MTDAEYVRIHEKLDIYTFKKQFFNNKKSVSHRCYVLFELKRRGERRACFWGYAVNKPQSGTERGIHAEIFSIRKVEEYLRDNPGQFTINWYSSWSPCADCAEKILEWYNQELRGNGHTLKIWACKLYYEKNARNQIGLWNLRDNGVGLNVMVSEHYQCCRKIFIQSSHNQLNENRWLEKTLKRAEKRRSELSIMIQVKILHTTKSPAV

SEQ ID NO: 42 - DNA, 766 bp, Petromyzon marinus
tgacacgacacagccgtgtatatgaggaagggtagctggatggggggggggggaatacgttcagagaggacattagcgagcgtcttgttggtggccttgagtctagacacctgcagacatgaccgacgctgagtacgtgagaatccatgagaagttggacatctacacgtttaagaaacagtttttcaacaacaaaaaatccgtgtcgcatagatgctacgttctctttgaattaaaacgacggggtgaacgtagagcgtgtttttggggctatgctgtgaataaaccacagagcgggacagaacgtggaattcacgccgaaatctttagcattagaaaagtcgaagaatacctgcgcgacaaccccggacaattcacgataaattggtactcatcctggagtccttgtgcagattgcgctgaaaagatcttagaatggtataaccaggagctgcgggggaacggccacactttgaaaatctgggcttgcaaactctattacgagaaaaatgcgaggaatcaaattgggctgtggaacctcagagataacggggttgggttgaatgtaatggtaagtgaacactaccaatgttgcaggaaaatattcatccaatcgtcgcacaatcaattgaatgagaatagatggcttgagaagactttgaagcgagctgaaaaacgacggagcgagttgtccattatgattcaggtaaaaatactccacaccactaagagtcctgctgtttaagaggctatgcggatggttttc

SEQ ID NO: 43 - protein, 145 aa, Homo sapiens
MDSLLMNRRKFLYQFKNVRWAKGRRETYLCYVVKRRDSATSFSLDFGYLRNKNGCHVELLFLRYISDWDLDPGRCYRVTWFTSWSPCYDCARHVADFLRGNPNLSLRIFTARLYFCEDRKAEPEGLRRLHRAGVQIAIMTFKAPV

SEQ ID NO: 44 - DNA, 10681 bp, Homo sapiens
agagaaccatcattaattgaagtgagatttttctggcctgagacttgcagggaggcaagaagacactctggacaccactatggacaggtaaagaggcagtcttctcgtgggtgattgcactggccttcctctcagagcaaatctgagtaatgagactggtagctatccctttctctcatgtaactgtctgactgataagatcagcttgatcaatatgcatatatattttttgatctgtctccttttcttctattcagatcttatacgctgtcagcccaattctttctgtttcagacttctcttgatttccctctttttcatgtggcaaaagaagtagtgcgtacaatgtactgattcgtcctgagatttgtaccatggttgaaactaatttatggtaataatattaacatagcaaatctttagagactcaaatcatgaaaaggtaatagcagtactgtactaaaaacggtagtgctaattttcgtaataattttgtaaatattcaacagtaaaacaacttgaagacacactttcctagggaggcgttactgaaataatttagctatagtaagaaaatttgtaattttagaaatgccaagcattctaaattaattgcttgaaagtcactatgattgtgtccattataaggagacaaattcattcaagcaagttatttaatgttaaaggcccaattgttaggcagttaatggcacttttactattaactaatctttccatttgttcagacgtagcttaacttacctcttaggtgtgaatttggttaaggtcctcataatgtctttatgtgcagtttttgataggttattgtcatagaacttattctattcctacatttatgattactatggatgtatgagaataacacctaatccttatactttacctcaatttaactcctttataaagaacttacattacagaataaagattttttaaaaatatatttttttgtagagacagggtcttagcccagccgaggctggtctctaagtcctggcccaagcgatcctcctgcctgggcctcctaaagtgctggaattatagacatgagccatcacatccaatatacagaataaagatttttaatggaggatttaatgttcttcagaaaattttcttgaggtcagacaatgtcaaatgtctcctcagtttacactgagattttgaaaacaagtctgagctataggtccttgtgaagggtccattggaaatacttgttcaaagtaaaatggaaagcaaaggtaaaatcagcagttgaaattcagagaaagacagaaaaggagaaaagatgaaattcaacaggacagaagggaaatatattatcattaaggaggacagtatctgtagagctcattagtgatggcaaaatgacttggtcaggattatttttaacccgcttgtttctggtttgcacggctggggatgcagctagggttctgcctcagggagcacagctgtccagagcagctgtcagcctgcaagcctgaaacactccctcggtaaagtccttcctactcaggacagaaatgacgagaacagggagctggaaacaggcccctaaccagagaagggaagtaatggatcaacaaagttaactagcaggtcaggatcacgcaattcatttcactctgactggtaacatgtgacagaaacagtgtaggcttattgtattttcatgtagagtaggacccaaaaatccacccaaagtcctttatctatgccacatccttcttatctatacttccaggacactttttcttccttatgataaggctctctctctctccacacacacacacacacacacacacacacacacacacacacacacaaacacacaccccgccaaccaaggtgcatgtaaaaagatgtagattcctctgcctttctcatctacacagcccaggagggtaagttaatataagagggatttattggtaagagatgatgcttaatctgtttaacactgggcctcaaagagagaatttcttttcttctgtacttattaagcacctattatgtgttgagcttatatatacaaagggttattatatgctaatatagtaatagtaatggtggttggtactatggtaattaccataaaaattattatccttttaaaataaagctaattattattggatcttttttagtattcattttatgttttttatgtttttgattttttaaaagacaatctcaccctgttacccaggctggagtgcagtggtgcaatcatagctttctgcagtcttgaactcctgggctcaagcaatcctcctgccttggcctcccaaagtgttgggatacagtcatgagccactgcatctggcctaggatccatttagattaaaatatgcattttaaattttaaaataatatggctaatttttaccttatgtaatgtgtatactggcaataaatctagtttgctgcctaaagtttaaagtgctttccagtaagcttcatgtacgtgaggggagacatttaaagtgaaacagacagccaggtgtggtggctcacgcctgtaatcccagcactctgggaggctgaggtgggtggatcgcttgagccctggagttcaagaccagcctgagcaacatggcaaaacgctgtttctataacaaaaattagccgggcatggtggcatgtgcctgtggtcccagctactagggggctgaggcaggagaatcgttggagcccaggaggtcaaggctgcactgagcagtgcttgcgccactgcactccagcctgggtgacaggaccagaccttgcctcaaaaaaataagaagaaaaattaaaaataaatggaaacaactacaaagagctgttgtcctagatgagctacttagttaggctgatattttggtatttaacttttaaagtcagggtctgtcacctgcactacattattaaaatatcaattctcaatgtatatccacacaaagactggtacgtgaatgttcatagtacctttattcacaaaaccccaaagtagagactatccaaatatccatcaacaagtgaacaaataaacaaaatgtgctatatccatgcaatggaataccaccctgcagtacaaagaagctacttggggatgaatcccaaagtcatgacgctaaatgaaagagtcagacatgaaggaggagataatgtatgccatacgaaattctagaaaatgaaagtaacttatagttacagaaagcaaatcagggcaggcatagaggctcacacctgtaatcccagcactttgagaggccacgtgggaagattgctagaactcaggagttcaagaccagcctgggcaacacagtgaaactccattctccacaaaaatgggaaaaaaagaaagcaaatcagtggttgtcctgtggggaggggaaggactgcaaagagggaagaagctctggtggggtgagggtggtgattcaggttctgtatcctgactgtggtagcagtttggggtgtttacatccaaaaatattcgtagaattatgcatcttaaatgggtggagtttactgtatgtaaattatacctcaatgtaagaaaaaataatgtgtaagaaaactttcaattctcttgccagcaaacgttattcaaattcctgagccctttacttcgcaaattctctgcacttctgccccgtaccattaggtgacagcactagctccacaaattggataaatgcatttctggaaaagactagggacaaaatccaggcatcacttgtgctttcatatcaaccatgctgtacagcttgtgttgctgtctgcagctgcaatggggactcttgatttctttaaggaaacttgggttaccagagtatttccacaaatgctattcaaattagtgcttatgatatgcaagacactgtgctaggagccagaaaacaaagaggaggagaaatcagtcattatgtgggaacaacatagcaagatatttagatcattttgactagttaaaaaagcagcagagtacaaaatcacacatgcaatcagtataatccaaatcatgtaaatatgtgcctgtagaaagactagaggaataaacacaagaatcttaacagtcattgtcattagacactaagtctaattattattattagacactatgatatttgagatttaaaaaatctttaatattttaaaatttagagctcttctatttttccatagtattcaagtttgacaatgatcaagtattactctttctttttttttttttttttttttttttgagatggagttttggtcttgttgcccatgctggagtggaatggcatgaccatagctcactgcaacctccacctcctgggttcaagcaaagctgtcgcctcagcctcccgggtagatgggattacaggcgcccaccaccacactcggctaatgtttgtatttttagtagagatggggtttcaccatgttggccaggctggtctcaaactcctgacctcagaggatccacctgcctcagcctcccaaagtgctgggattacagatgtaggccactgcgcccggccaagtattgctcttatacattaaaaaacaggtgtgagccactgcgcccagccaggtattgctcttatacattaaaaaataggccggtgcagtggctcacgcctgtaatcccagcactttgggaagccaaggcgggcagaacacccgaggtcaggagtccaaggccagcctggccaagatggtgaaaccccgtctctattaaaaatacaaacattacctgggcatgatggtgggcgcctgtaatcccagctactcaggaggctgaggcaggaggatccgcggagcctggcagatctgcctgagcctgggaggttgaggctacagtaagccaagatcatgccagtatacttcagcctgggcgacaaagtgagaccgtaacaaaaaaaaaaaaatttaaaaaaagaaatttagatcaagatccaactgtaaaaagtggcctaaacaccacattaaagagtttggagtttattctgcaggcagaagagaaccatcagggggtcttcagcatgggaatggcatggtgcacctggtttttgtgagatcatggtggtgacagtgtggggaatgttattttggagggactggaggcagacagaccggttaaaaggccagcacaacagataaggaggaagaagatgagggcttggaccgaagcagagaagagcaaacagggaaggtacaaattcaagaaatattggggggtttgaatcaacacatttagatgattaattaaatatgaggactgaggaataagaaatgagtcaaggatggttccaggctgctaggctgcttacctgaggtggcaaagtcgggaggagtggcagtttaggacagggggcagttgaggaatattgttttgatcattttgagtttgaggtacaagttggacacttaggtaaagactggaggggaaatctgaatatacaattatgggactgaggaacaagtttattttattttttgtttcgttttcttgttgaagaacaaatttaattgtaatcccaagtcatcagcatctagaagacagtggcaggaggtgactgtcttgtgggtaagggtttggggtccttgatgagtatctctcaattggccttaaatataagcaggaaaaggagtttatgatggattccaggctcagcagggctcaggagggctcaggcagccagcagaggaagtcagagcatcttctttggtttagcccaagtaatgacttccttaaaaagctgaaggaaaatccagagtgaccagattataaactgtactcttgcattttctctccctcctctcacccacagcctcttgatgaaccggaggaagtttctttaccaattcaaaaatgtccgctgggctaagggtcggcgtgagacctacctgtgctacgtagtgaagaggcgtgacagtgctacatccttttcactggactttggttatcttcgcaataaggtatcaattaaagtcggctttgcaagcagtttaatggtcaactgtgagtgcttttagagccacctgctgatggtattacttccatccttttttggcatttgtgtctctatcacattcctcaaatccttttttttatttctttttccatgtccatgcacccatattagacatggcccaaaatatgtgatttaattcctccccagtaatgctgggcaccctaataccactccttccttcagtgccaagaacaactgctcccaaactgtttaccagctttcctcagcatctgaattgcctttgagattaattaagctaaaagcatttttatatgggagaatattatcagcttgtccaagcaaaaattttaaatgtgaaaaacaaattgtgtcttaagcatttttgaaaattaaggaagaagaatttgggaaaaaattaacggtggctcaattctgtcttccaaatgatttcttttccctcctactcacatgggtcgtaggccagtgaatacattcaacatggtgatccccagaaaactcagagaagcctcggctgatgattaattaaattgatctttcggctacccgagagaattacatttccaagagacttcttcaccaaaatccagatgggtttacataaacttctgcccacgggtatctcctctctcctaacacgctgtgacgtctgggcttggtggaatctcagggaagcatccgtggggtggaaggtcatcgtctggctcgttgtttgatggttatattaccatgcaattttctttgcctacatttgtattgaatacatcccaatctccttcctattcggtgacatgacacattctatttcagaaggctttgattttatcaagcactttcatttacttctcatggcagtgcctattacttctcttacaatacccatctgtctgctttaccaaaatctatttccccttttcagatcctcccaaatggtcctcataaactgtcctgcctccacctagtggtccaggtatatttccacaatgttacatcaacaggcacttctagccattttccttctcaaaaggtgcaaaaagcaacttcataaacacaaattaaatcttcggtgaggtagtgtgatgctgcttcctcccaactcagcgcacttcgtcttcctcattccacaaaaacccatagccttccttcactctgcaggactagtgctgccaagggttcagctctacctactggtgtgctcttttgagcaagttgcttagcctctctgtaacacaaggacaatagctgcaagcatccccaaagatcattgcaggagacaatgactaaggctaccagagccgcaataaaagtcagtgaattttagcgtggtcctctctgtctctccagaacggctgccacgtggaattgctcttcctccgctacatctcggactgggacctagaccctggccgctgctaccgcgtcacctggttcacctcctggagcccctgctacgactgtgcccgacatgtggccgactttctgcgagggaaccccaacctcagtctgaggatcttcaccgcgcgcctctacttctgtgaggaccgcaaggctgagcccgaggggctgcggcggctgcaccgcgccggggtgcaaatagccatcatgaccttcaaaggtgcgaaagggccttccgcgcaggcgcagtgcagcagcccgcattcgggattgcgatgcggaatgaatgagttagtggggaagctcgaggggaagaagtgggcggggattctggttcacctctggagccgaaattaaagattagaagcagagaaaagagtgaatggctcagagacaaggccccgaggaaatgagaaaatggggccagggttgcttctttcccctcgatttggaacctgaactgtcttctacccccatatccccgcctttttttcctttttttttttttgaagattatttttactgctggaatacttttgtagaaaaccacgaaagaactttcaaagcctgggaagggctgcatgaaaattcagttcgtctctccagacagcttcggcgcatccttttggtaaggggcttcctcgctttttaaattttctttctttctctacagtcttttttggagtttcgtatatttcttatattttcttattgttcaatcactctcagttttcatctgatgaaaactttatttctcctccacatcagctttttcttctgctgtttcaccattcagagccctctgctaaggttccttttccctcccttttctttcttttgttgtttcacatctttaaatttctgtctctccccagggttgcgtttccttcctggtcagaattcttttctcctttttttttttttttttttttttttttaaacaaacaaacaaaaaacccaaaaaaactctttcccaatttactttcttccaacatgttacaaagccatccactcagtttagaagactctccggccccaccgacccccaacctcgttttgaagccattcactcaatttgcttctctctttctctacagcccctgtatgaggttgatgacttacgagacgcatttcgtactttgggactttgatagcaacttccaggaatgtcacacacgatgaaatatctctgctgaagacagtggataaaaaacagtccttcaagtcttctctgtttttattcttcaactctcactttcttagagtttacagaaaaaatatttatatacgactctttaaaaagatctatgtcttgaaaatagagaaggaacacaggtctggccagggacgtgctgcaattggtgcagttttgaatgcaacattgtcccctactgggaataacagaactgcaggacctgggagcatcctaaagtgtcaacgtttttctatgacttttaggtaggatgagagcagaaggtagatcctaaaaagcatggtgagaggatcaaatgtttttatatcaacatcctttattatttgattcatttgagttaacagtggtgttagtgatagatttttctattcttttcccttgacgtttactttcaagtaacacaaactcttccatcaggccatgatctataggacctcctaatgagagtatctgggtgattgtgaccccaaaccatctctccaaagcattaatatccaatcatgcgctgtatgttttaatcagcagaagcatgtttttatgtttgtacaaaagaagattgttatgggtggggatggaggtatagaccatgcatggtcaccttcaagctactttaataaaggatcttaaaatgggcaggaggactgtgaacaagacaccctaataatgggttgatgtctgaagtagcaaatcttctggaaacgcaaactcttttaaggaagtccctaatttagaaacacccacaaacttcacatatcataattagcaaacaattggaaggaagttgcttgaatgttggggagaggaaaatctattggctctcgtgggtctcttcatctcagaaatgccaatcaggtcaaggtttgctacattttgtatgtgtgtgatgcttctcccaaaggtatattaactatataagagagttgtgacaaaacagaatgataaagctgcgaaccgtggcacacgctcatagttctagctgcttgggaggttgaggagggaggatggcttgaacacaggtgttcaaggccagcctgggcaacataacaagatcctgtctctcaaaaaaaaaaaaaaaaaaaagaaagagagagggccgggcgtggtggctcacgcctgtaatcccagcactttgggaggccgagccgggcggatcacctgtggtcaggagtttgagaccagcctggccaacatggcaaaaccccgtctgtactcaaaatgcaaaaattagccaggcgtggtagcaggcacctgtaatcccagctacttgggaggctgaggcaggagaatcgcttgaacccaggaggtggaggttgcagtaagctgagatcgtgccgttgcactccagcctgggcgacaagagcaagactctgtctcagaaaaaaaaaaaaaaaagagagagagagagaaagagaacaatatttgggagagaaggatggggaagcattgcaaggaaattgtgctttatccaacaaaatgtaaggagccaataagggatccctatttgtctcttttggtgtctatttgtccctaacaactgtctttgacagtgagaaaaatattcagaataaccatatccctgtgccgttattacctagcaacccttgcaatgaagatgagcagatccacaggaaaacttgaatgcacaactgtcttattttaatcttattgtacataagtttgtaaaagagttaaaaattgttacttcatgtattcatttatattttatattattttgcgtctaatgattttttattaacatgatttccttttctgatatattgaaatggagtctcaaagcttcataaatttataactttagaaatgattctaataacaacgtatgtaattgtaacattgcagtaatggtgctacgaagccatttctcttgatttttagtaaacttttatgacagcaaatttgcttctggctcactttcaatcagttaaataaatgataaataattttggaagctgtgaagataaaataccaaataaaataatataaaagtgatttatatgaagttaaaataaaaaatcagtatgatggaataaacttg

SEQ ID NO: 45-55 - skipped (11 entries)

SEQ ID NO: 56 - protein, 16 aa, Artificial Sequence
  Description of Artificial Sequence: Synthetic peptide
SGSETPGTSESATPES

SEQ ID NO: 57 - protein, 4 aa, Artificial Sequence
  Description of Artificial Sequence: Synthetic peptide
SGGS

SEQ ID NO: 58-64 - skipped (7 entries)

SEQ ID NO: 65 - protein, 5 aa, Artificial Sequence
  Description of Artificial Sequence: Synthetic peptide
PAPAP

SEQ ID NO: 66 - protein, 6 aa, Artificial Sequence
  Description of Artificial Sequence: Synthetic peptide
PAPAPA

SEQ ID NO: 67 - protein, 7 aa, Artificial Sequence
  Description of Artificial Sequence: Synthetic peptide
PAPAPAP

SEQ ID NO: 68 - protein, 8 aa, Artificial Sequence
  Description of Artificial Sequence: Synthetic peptide
PAPAPAPA

SEQ ID NO: 69 - protein, 9 aa, Artificial Sequence
  Description of Artificial Sequence: Synthetic peptide
PAPAPAPAP

SEQ ID NO: 70 - protein, 15 aa, Artificial Sequence
  Description of Artificial Sequence: Synthetic peptide
PAPAPAPAPAPAPAP

SEQ ID NO: 71 - protein, 21 aa, Artificial Sequence
  Description of Artificial Sequence: Synthetic peptide
PAPAPAPAPAPAPAPAPAPAP

SEQ ID NO: 72-82 - skipped (11 entries)

SEQ ID NO: 83 - protein, 29 aa, Artificial Sequence
  Description of Artificial Sequence: Synthetic peptide
PKKKRKVEGADKRTADGSEFESPKKKRKV

SEQ ID NO: 84 - protein, 18 aa, Artificial Sequence
  Description of Artificial Sequence: Synthetic peptide
KRTADGSEFESPKKKRKV

SEQ ID NO: 85 - protein, 16 aa, Artificial Sequence
  Description of Artificial Sequence: Synthetic peptide
KRPAATKKAGQAKKKK

SEQ ID NO: 86 - protein, 17 aa, Artificial Sequence
  Description of Artificial Sequence: Synthetic peptide
KKTELQTTNAENKTKKL

SEQ ID NO: 87 - protein, 19 aa, Artificial Sequence
  Description of Artificial Sequence: Synthetic peptide
KRGINDRNFWRGENGRKTR

SEQ ID NO: 88 - protein, 16 aa, Artificial Sequence
  Description of Artificial Sequence: Synthetic peptide
RKSGKIAAIVVKRPRK

SEQ ID NO: 89 - protein, 7 aa, Artificial Sequence
  Description of Artificial Sequence: Synthetic peptide
PKKKRKV

SEQ ID NO: 90 - protein, 30 aa, Artificial Sequence
  Description of Artificial Sequence: Synthetic peptide
MDSLLMNRRKFLYQFKNVRWAKGRRETYLC

SEQ ID NO: 91-105 - skipped (15 entries)

SEQ ID NO: 106 - protein, 84 aa, Unknown
  Description of Unknown: Bacillus phage PBS2 sequence
MTNLSDIIEKETGKQLVIQESILMLPEEVEEVIGNKPESDILVHTAYDESTDENVMLLTSDAPEYKPWALVIQDSNGENKIKML

SEQ ID NO: 107-108 - skipped (2 entries)

SEQ ID NO: 109 - protein, 5 aa, Artificial Sequence
  Description of Artificial Sequence: Synthetic peptide
GGGGS

SEQ ID NO: 110-222 - skipped (113 entries)

SEQ ID NO: 223 - protein, 1368 aa, Unknown [sequence omitted]

SEQ ID NO: 224 - RNA, 80 nt, Artificial Sequence
  Description of Artificial Sequence: Synthetic oligonucleotide
guuuuagagcuagaaauagcaaguuaaaauaaggcuaguccguuaucaacuugaaaaaguggcaccgagucggugcuuuu

SEQ ID NO: 225 - RNA, 125 nt, Artificial Sequence
  Description of Artificial Sequence: Synthetic polynucleotide
guuuuuguacucucaagauuuaaguaacuguacaacgaaacuuacacaguuacuuaaaucuugcagaagcuacaaagauaaggcuucaugccgaaaucaacacccugucauuuuauggcagggug

SEQ ID NO: 226 - RNA, 76 nt, Artificial Sequence
  Description of Artificial Sequence: Synthetic oligonucleotide
guuuuagagcuagaaauagcaaguuaaaauaaggcuaguccguuaucaacuugaaaaaguggcaccgagucggugc

SEQ ID NO: 227 - RNA, 84 nt, Artificial Sequence
  Description of Artificial Sequence: Synthetic oligonucleotide
guuuuaguacucuguaaugaaaauuacagaaucuacuaaaacaaggcaaaaugccguguuuaucucgucaacuuguuggcgaga

SEQ ID NO: 228 - RNA, 97 nt, Artificial Sequence
  Description of Artificial Sequence: Synthetic oligonucleotide
guucugucuuuuggucaggacaaccgucuagcuauaagugcugcagggugugagaaacuccuauugcuggacgaugucucuuacgaggcauuagcac

SEQ ID NO: 229 - RNA, 88 nt, Artificial Sequence
  Description of Artificial Sequence: Synthetic oligonucleotide
gaccuauagggucaaugaaucugugcgugugccauaaguaauuaaaaauuacccaccacaggagcaccugaaaacaggugcuuggcac

SEQ ID NO: 230 - RNA, 80 nt, Artificial Sequence
  Description of Artificial Sequence: Synthetic oligonucleotide
guuuuagagcuagaaauagcaaguuaaaauaaggcuaguccguuaucaacuugaaaaagugggaccgagucggugcuuuu

SEQ ID NO: 231 - DNA, 4104 bp, Streptococcus pyogenes
atggataagaaatactcaataggcttagatatcggcacaaatagcgtcggatgggcggtgatcactgatgattataaggttccgtctaaaaagttcaaggttctgggaaatacagaccgccacagtatcaaaaaaaatcttataggggctcttttatttggcagtggagagacagcggaagcgactcgtctcaaacggacagctcgtagaaggtatacacgtcggaagaatcgtatttgttatctacaggagattttttcaaatgagatggcgaaagtagatgatagtttctttcatcgacttgaagagtcttttttggtggaagaagacaagaagcatgaacgtcatcctatttttggaaatatagtagatgaagttgcttatcatgagaaatatccaactatctatcatctgcgaaaaaaattggcagattctactgataaagcggatttgcgcttaatctatttggccttagcgcatatgattaagtttcgtggtcattttttgattgagggagatttaaatcctgataatagtgatgtggacaaactatttatccagttggtacaaatctacaatcaattatttgaagaaaaccctattaacgcaagtagagtagatgctaaagcgattctttctgcacgattgagtaaatcaagacgattagaaaatctcattgctcagctccccggtgagaagagaaatggcttgtttgggaatctcattgctttgtcattgggattgacccctaattttaaatcaaattttgatttggcagaagatgctaaattacagctttcaaaagatacttacgatgatgatttagataatttattggcgcaaattggagatcaatatgctgatttgtttttggcagctaagaatttatcagatgctattttactttcagatatcctaagagtaaatagtgaaataactaaggctcccctatcagcttcaatgattaagcgctacgatgaacatcatcaagacttgactcttttaaaagctttagttcgacaacaacttccagaaaagtataaagaaatcttttttgatcaatcaaaaaacggatatgcaggttatattgatgggggagctagccaagaagaattttataaatttatcaaaccaattttagaaaaaatggatggtactgaggaattattggtgaaactaaatcgtgaagatttgctgcgcaagcaacggacctttgacaacggctctattccccatcaaattcacttgggtgagctgcatgctattttgagaagacaagaagacttttatccatttttaaaagacaatcgtgagaagattgaaaaaatcttgacttttcgaattccttattatgttggtccattggcgcgtggcaatagtcgttttgcatggatgactcggaagtctgaagaaacaattaccccatggaattttgaagaagttgtcgataaaggtgcttcagctcaatcatttattgaacgcatgacaaactttgataaaaatcttccaaatgaaaaagtactaccaaaacatagtttgctttatgagtattttacggtttataacgaattgacaaaggtcaaatatgttactgagggaatgcgaaaaccagcatttctttcaggtgaacagaagaaagccattgttgatttactcttcaaaacaaatcgaaaagtaaccgttaagcaattaaaagaagattatttcaaaaaaatagaatgttttgatagtgttgaaatttcaggagttgaagatagatttaatgcttcattaggcgcctaccatgatttgctaaaaattattaaagataaagattttttggataatgaagaaaatgaagatatcttagaggatattgttttaacattgaccttatttgaagatagggggatgattgaggaaagacttaaaacatatgctcacctctttgatgataaggtgatgaaacagcttaaacgtcgccgttatactggttggggacgtttgtctcgaaaattgattaatggtattagggataagcaatctggcaaaacaatattagattttttgaaatcagatggttttgccaatcgcaattttatgcagctgatccatgatgatagtttgacatttaaagaagatattcaaaaagcacaggtgtctggacaaggccatagtttacatgaacagattgctaacttagctggcagtcctgctattaaaaaaggtattttacagactgtaaaaattgttgatgaactggtcaaagtaatggggcataagccagaaaatatcgttattgaaatggcacgtgaaaatcagacaactcaaaagggccagaaaaattcgcgagagcgtatgaaacgaatcgaagaaggtatcaaagaattaggaagtcagattcttaaagagcatcctgttgaaaatactcaattgcaaaatgaaaagctctatctctattatctacaaaatggaagagacatgtatgtggaccaagaattagatattaatcgtttaagtgattatgatgtcgatcacattgttccacaaagtttcattaaagacgattcaatagacaataaggtactaacgcgttctgataaaaatcgtggtaaatcggataacgttccaagtgaagaagtagtcaaaaagatgaaaaactattggagacaacttctaaacgccaagttaatcactcaacgtaagtttgataatttaacgaaagctgaacgtggaggtttgagtgaacttgataaagctggttttatcaaacgccaattggttgaaactcgccaaatcactaagcatgtggcacaaattttggatagtcgcatgaatactaaatacgatgaaaatgataaacttattcgagaggttaaagtgattaccttaaaatctaaattagtttctgacttccgaaaagatttccaattctataaagtacgtgagattaacaattaccatcatgcccatgatgcgtatctaaatgccgtcgttggaactgctttgattaagaaatatccaaaacttgaatcggagtttgtctatggtgattataaagtttatgatgttcgtaaaatgattgctaagtctgagcaagaaataggcaaagcaaccgcaaaatatttcttttactctaatatcatgaacttcttcaaaacagaaattacacttgcaaatggagagattcgcaaacgccctctaatcgaaactaatggggaaactggagaaattgtctgggataaagggcgagattttgccacagtgcgcaaagtattgtccatgccccaagtcaatattgtcaagaaaacagaagtacagacaggcggattctccaaggagtcaattttaccaaaaagaaattcggacaagcttattgctcgtaaaaaagactgggatccaaaaaaatatggtggttttgatagtccaacggtagcttattcagtcctagtggttgctaaggtggaaaaagggaaatcgaagaagttaaaatccgttaaagagttactagggatcacaattatggaaagaagttcctttgaaaaaaatccgattgactttttagaagctaaaggatataaggaagttaaaaaagacttaatcattaaactacctaaatatagtctttttgagttagaaaacggtcgtaaacggatgctggctagtgccggagaattacaaaaaggaaatgagctggctctgccaagcaaatatgtgaattttttatatttagctagtcattatgaaaagttgaagggtagtccagaagataacgaacaaaaacaattgtttgtggagcagcataagcattatttagatgagattattgagcaaatcagtgaattttctaagcgtgttattttagcagatgccaatttagataaagttcttagtgcatataacaaacatagagacaaaccaatacgtgaacaagcagaaaatattattcatttatttacgttgacgaatcttggagctcccgctgcttttaaatattttgatacaacaattgatcgtaaacgatatacgtctacaaaagaagttttagatgccactcttatccatcaatccatcactggtctttatgaaacacgcattgatttgagtcagctaggaggtgactga

SEQ ID NO: 232 - protein, 1367 aa, Streptococcus pyogenes
MDKKYSIGLDIGTNSVGWAVITDDYKVPSKKFKVLGNTDRHSIKKNLIGALLFGSGETAEATRLKRTARRRYTRRKNRICYLQEIFSNEMAKVDDSFFHRLEESFLVEEDKKHERHPIFGNIVDEVAYHEKYPTIYHLRKKLADSTDKADLRLIYLALAHMIKFRGHFLIEGDLNPDNSDVDKLFIQLVQIYNQLFEENPINASRVDAKAILSARLSKSRRLENLIAQLPGEKRNGLFGNLIALSLGLTPNFKSNFDLAEDAKLQLSKDTYDDDLDNLLAQIGDQYADLFLAAKNLSDAILLSDILRVNSEITKAPLSASMIKRYDEHHQDLTLLKALVRQQLPEKYKEIFFDQSKNGYAGYIDGGASQEEFYKFIKPILEKMDGTEELLVKLNREDLLRKQRTFDNGSIPHQIHLGELHAILRRQEDFYPFLKDNREKIEKILTFRIPYYVGPLARGNSRFAWMTRKSEETITPWNFEEVVDKGASAQSFIERMTNFDKNLPNEKVLPKHSLLYEYFTVYNELTKVKYVTEGMRKPAFLSGEQKKAIVDLLFKTNRKVTVKQLKEDYFKKIECFDSVEISGVEDRFNASLGAYHDLLKIIKDKDFLDNEENEDILEDIVLTLTLFEDRGMIEERLKTYAHLFDDKVMKQLKRRRYTGWGRLSRKLINGIRDKQSGKTILDFLKSDGFANRNFMQLIHDDSLTFKEDIQKAQVSGQGHSLHEQIANLAGSPAIKKGILQTVKIVDELVKVMGHKPENIVIEMARENQTTQKGQKNSRERMKRIEEGIKELGSQILKEHPVENTQLQNEKLYLYYLQNGRDMYVDQELDINRLSDYDVDHIVPQSFIKDDSIDNKVLTRSDKNRGKSDNVPSEEVVKKMKNYWRQLLNAKLITQRKFDNLTKAERGGLSELDKAGFIKRQLVETRQITKHVAQILDSRMNTKYDENDKLIREVKVITLKSKLVSDFRKDFQFYKVREINNYHHAHDAYLNAVVGTALIKKYPKLESEFVYGDYKVYDVRKMIAKSEQEIGKATAKYFFYSNIMNFFKTEITLANGEIRKRPLIETNGETGEIVWDKGRDFATVRKVLSMPQVNIVKKTEVQTGGFSKESILPKRNSDKLIARKKDWDPKKYGGFDSPTVAYSVLVVAKVEKGKSKKLKSVKELLGITIMERSSFEKNPIDFLEAKGYKEVKKDLIIKLPKYSLFELENGRKRMLASAGELQKGNELALPSKYVNFLYLASHYEKLKGSPEDNEQKQLFVEQHKHYLDEIIEQISEFSKRVILADANLDKVLSAYNKHRDKPIREQAENIIHLFTLTNLGAPAAFKYFDTTIDRKRYTSTKEVLDATLIHQSITGLYETRIDLSQLGGD

SEQ ID NO: 233 - DNA, 4212 bp, Unknown
  Description of Unknown: Cas9 domain sequence
atggataaaaagtattctattggtttagacatcggcactaattccgttggatgggctgtcataaccgatgaatacaaagtaccttcaaagaaatttaaggtgttggggaacacagaccgtcattcgattaaaaagaatcttatcggtgccctcctattcgatagtggcgaaacggcagaggcgactcgcctgaaacgaaccgctcggagaaggtatacacgtcgcaagaaccgaatatgttacttacaagaaatttttagcaatgagatggccaaagttgacgattctttctttcaccgtttggaagagtccttccttgtcgaagaggacaagaaacatgaacggcaccccatctttggaaacatagtagatgaggtggcatatcatgaaaagtacccaacgatttatcacctcagaaaaaagctagttgactcaactgataaagcggacctgaggttaatctacttggctcttgcccatatgataaagttccgtgggcactttctcattgagggtgatctaaatccggacaactcggatgtcgacaaactgttcatccagttagtacaaacctataatcagttgtttgaagagaaccctataaatgcaagtggcgtggatgcgaaggctattcttagcgcccgcctctctaaatcccgacggctagaaaacctgatcgcacaattacccggagagaagaaaaatgggttgttcggtaaccttatagcgctctcactaggcctgacaccaaattttaagtcgaacttcgacttagctgaagatgccaaattgcagcttagtaaggacacgtacgatgacgatctcgacaatctactggcacaaattggagatcagtatgcggacttatttttggctgccaaaaaccttagcgatgcaatcctcctatctgacatactgagagttaatactgagattaccaaggcgccgttatccgcttcaatgatcaaaaggtacgatgaacatcaccaagacttgacacttctcaaggccctagtccgtcagcaactgcctgagaaatataaggaaatattctttgatcagtcgaaaaacgggtacgcaggttatattgacggcggagcgagtcaagaggaattctacaagtttatcaaacccatattagagaagatggatgggacggaagagttgcttgtaaaactcaatcgcgaagatctactgcgaaagcagcggactttcgacaacggtagcattccacatcaaatccacttaggcgaattgcatgctatacttagaaggcaggaggatttttatccgttcctcaaagacaatcgtgaaaagattgagaaaatcctaacctttcgcataccttactatgtgggacccctggcccgagggaactctcggttcgcatggatgacaagaaagtccgaagaaacgattactccatggaattttgaggaagttgtcgataaaggtgcgtcagctcaatcgttcatcgagaggatgaccaactttgacaagaatttaccgaacgaaaaagtattgcctaagcacagtttactttacgagtatttcacagtgtacaatgaactcacgaaagttaagtatgtcactgagggcatgcgtaaacccgcctttctaagcggagaacagaagaaagcaatagtagatctgttattcaagaccaaccgcaaagtgacagttaagcaattgaaagaggactactttaagaaaattgaatgcttcgattctgtcgagatctccggggtagaagatcgatttaatgcgtcacttggtacgtatcatgacctcctaaagataattaaagataaggacttcctggataacgaagagaatgaagatatcttagaagatatagtgttgactcttaccctctttgaagatcgggaaatgattgaggaaagactaaaaacatacgctcacctgttcgacgataaggttatgaaacagttaaagaggcgtcgctatacgggctggggacgattgtcgcggaaacttatcaacgggataagagacaagcaaagtggtaaaactattctcgattttctaaagagcgacggcttcgccaataggaactttatgcagctgatccatgatgactctttaaccttcaaagaggatatacaaaaggcacaggtttccggacaaggggactcattgcacgaacatattgcgaatcttgctggttcgccagccatcaaaaagggcatactccagacagtcaaagtagtggatgagctagttaaggtcatgggacgtcacaaaccggaaaacattgtaatcgagatggcacgcgaaaatcaaacgactcagaaggggcaaaaaaacagtcgagagcggatgaagagaatagaagagggtattaaagaactgggcagccagatcttaaaggagcatcctgtggaaaatacccaattgcagaacgagaaactttacctctattacctacaaaatggaagggacatgtatgttgatcaggaactggacataaaccgtttatctgattacgacgtcgatcacattgtaccccaatcctttttgaaggacgattcaatcgacaataaagtgcttacacgctcggataagaaccgagggaaaagtgacaatgttccaagcgaggaagtcgtaaagaaaatgaagaactattggcggcagctcctaaatgcgaaactgataacgcaaagaaagttcgataacttaactaaagctgagaggggtggcttgtctgaacttgacaaggccggatttattaaacgtcagctcgtggaaacccgccaaatcacaaagcatgttgcacagatactagattcccgaatgaatacgaaatacgacgagaacgataagctgattcgggaagtcaaagtaatcactttaaagtcaaaattggtgtcggacttcagaaaggattttcaattctataaagttagggagataaataactaccaccatgcgcacgacgcttatcttaatgccgtcgtagggaccgcactcattaagaaatacccgaagctagaaagtgagtttgtgtatggtgattacaaagtttatgacgtccgtaagatgatcgcgaaaagcgaacaggagataggcaaggctacagccaaatacttcttttattctaacattatgaatttctttaagacggaaatcactctggcaaacggagagatacgcaaacgacctttaattgaaaccaatggggagacaggtgaaatcgtatgggataagggccgggacttcgcgacggtgagaaaagttttgtccatgccccaagtcaacatagtaaagaaaactgaggtgcagaccggagggttttcaaaggaatcgattcttccaaaaaggaatagtgataagctcatcgctcgtaaaaaggactgggacccgaaaaagtacggtggcttcgatagccctacagttgcctattctgtcctagtagtggcaaaagttgagaagggaaaatccaagaaactgaagtcagtcaaagaattattggggataacgattatggagcgctcgtcttttgaaaagaaccccatcgacttccttgaggcgaaaggttacaaggaagtaaaaaaggatctcataattaaactaccaaagtatagtctgtttgagttagaaaatggccgaaaacggatgttggctagcgccggagagcttcaaaaggggaacgaactcgcactaccgtctaaatacgtgaatttcctgtatttagcgtcccattacgagaagttgaaaggttcacctgaagataacgaacagaagcaactttttgttgagcagcacaaacattatctcgacgaaatcatagagcaaatttcggaattcagtaagagagtcatcctagctgatgccaatctggacaaagtattaagcgcatacaacaagcacagggataaacccatacgtgagcaggcggaaaatattatccatttgtttactcttaccaacctcggcgctccagccgcattcaagtattttgacacaacgatagatcgcaaacgatacacttctaccaaggaggtgctagacgcgacactgattcaccaatccatcacgggattatatgaaactcggatagatttgtcacagcttgggggtgacggatcccccaagaagaagaggaaagtctcgagcgactacaaagaccatgacggtgattataaagatcatgacatcgattacaaggatgacgatgacaaggctgcagga

SEQ ID NO: 234 - protein, 1368 aa, Artificial Sequence
  Description of Artificial Sequence: Synthetic polypeptide
MDKKYSIGLAIGTNSVGWAVITDEYKVPSKKFKVLGNTDRHSIKKNLIGALLFDSGETAEATRLKRTARRRYTRRKNRICYLQEIFSNEMAKVDDSFFHRLEESFLVEEDKKHERHPIFGNIVDEVAYHEKYPTIYHLRKKLVDSTDKADLRLIYLALAHMIKFRGHFLIEGDLNPDNSDVDKLFIQLVQTYNQLFEENPINASGVDAKAILSARLSKSRRLENLIAQLPGEKKNGLFGNLIALSLGLTPNFKSNFDLAEDAKLQLSKDTYDDDLDNLLAQIGDQYADLFLAAKNLSDAILLSDILRVNTEITKAPLSASMIKRYDEHHQDLTLLKALVRQQLPEKYKEIFFDQSKNGYAGYIDGGASQEEFYKFIKPILEKMDGTEELLVKLNREDLLRKQRTFDNGSIPHQIHLGELHAILRRQEDFYPFLKDNREKIEKILTFRIPYYVGPLARGNSRFAWMTRKSEETITPWNFEEVVDKGASAQSFIERMTNFDKNLPNEKVLPKHSLLYEYFTVYNELTKVKYVTEGMRKPAFLSGEQKKAIVDLLFKTNRKVTVKQLKEDYFKKIECFDSVEISGVEDRFNASLGTYHDLLKIIKDKDFLDNEENEDILEDIVLTLTLFEDREMIEERLKTYAHLFDDKVMKQLKRRRYTGWGRLSRKLINGIRDKQSGKTILDFLKSDGFANRNFMQLIHDDSLTFKEDIQKAQVSGQGDSLHEHIANLAGSPAIKKGILQTVKVVDELVKVMGRHKPENIVIEMARENQTTQKGQKNSRERMKRIEEGIKELGSQILKEHPVENTQLQNEKLYLYYLQNGRDMYVDQELDINRLSDYDVDHIVPQSFLKDDSIDNKVLTRSDKNRGKSDNVPSEEVVKKMKNYWRQLLNAKLITQRKFDNLTKAERGGLSELDKAGFIKRQLVETRQITKHVAQILDSRMNTKYDENDKLIREVKVITLKSKLVSDFRKDFQFYKVREINNYHHAHDAYLNAVVGTALIKKYPKLESEFVYGDYKVYDVRKMIAKSEQEIGKATAKYFFYSNIMNFFKTEITLANGEIRKRPLIETNGETGEIVWDKGRDFATVRKVLSMPQVNIVKKTEVQTGGFSKESILPKRNSDKLIARKKDWDPKKYGGFDSPTVAYSVLVVAKVEKGKSKKLKSVKELLGITIMERSSFEKNPIDFLEAKGYKEVKKDLIIKLPKYSLFELENGRKRMLASAGELQKGNELALPSKYVNFLYLASHYEKLKGSPEDNEQKQLFVEQHKHYLDEIIEQISEFSKRVILADANLDKVLSAYNKHRDKPIREQAENIIHLFTLTNLGAPAAFKYFDTTIDRKRYTSTKEVLDATLIHQSITGLYETRIDLSQLGGD

SEQ ID NO: 235 - DNA, 4212 bp, Unknown; identical to SEQ ID NO: 233
  Description of Unknown: Cas9 polynucleotide sequence

SEQ ID NO: 236 - protein, 1368 aa, Unknown; identical to SEQ ID NO: 234
  Description of Unknown: Cas9 polynucleotide sequence

SEQ ID NO: 237 - DNA, 4107 bp, Streptococcus pyogenes
atggataagaaatactcaataggcttagatatcggcacaaatagcgtcggatgggcggtgatcactgatgaatataaggttccgtctaaaaagttcaaggttctgggaaatacagaccgccacagtatcaaaaaaaatcttataggggctcttttatttgacagtggagagacagcggaagcgactcgtctcaaacggacagctcgtagaaggtatacacgtcggaagaatcgtatttgttatctacaggagattttttcaaatgagatggcgaaagtagatgatagtttctttcatcgacttgaagagtcttttttggtggaagaagacaagaagcatgaacgtcatcctatttttggaaatatagtagatgaagttgcttatcatgagaaatatccaactatctatcatctgcgaaaaaaattggtagattctactgataaagcggatttgcgcttaatctatttggccttagcgcatatgattaagtttcgtggtcattttttgattgagggagatttaaatcctgataatagtgatgtggacaaactatttatccagttggtacaaacctacaatcaattatttgaagaaaaccctattaacgcaagtggagtagatgctaaagcgattctttctgcacgattgagtaaatcaagacgattagaaaatctcattgctcagctccccggtgagaagaaaaatggcttatttgggaatctcattgctttgtcattgggtttgacccctaattttaaatcaaattttgatttggcagaagatgctaaattacagctttcaaaagatacttacgatgatgatttagataatttattggcgcaaattggagatcaatatgctgatttgtttttggcagctaagaatttatcagatgctattttactttcagatatcctaagagtaaatactgaaataactaaggctcccctatcagcttcaatgattaaacgctacgatgaacatcatcaagacttgactcttttaaaagctttagttcgacaacaacttccagaaaagtataaagaaatcttttttgatcaatcaaaaaacggatatgcaggttatattgatgggggagctagccaagaagaattttataaatttatcaaaccaattttagaaaaaatggatggtactgaggaattattggtgaaactaaatcgtgaagatttgctgcgcaagcaacggacctttgacaacggctctattccccatcaaattcacttgggtgagctgcatgctattttgagaagacaagaagacttttatccatttttaaaagacaatcgtgagaagattgaaaaaatcttgacttttcgaattccttattatgttggtccattggcgcgtggcaatagtcgttttgcatggatgactcggaagtctgaagaaacaattaccccatggaattttgaagaagttgtcgataaaggtgcttcagctcaatcatttattgaacgcatgacaaactttgataaaaatcttccaaatgaaaaagtactaccaaaacatagtttgctttatgagtattttacggtttataacgaattgacaaaggtcaaatatgttactgaaggaatgcgaaaaccagcatttctttcaggtgaacagaagaaagccattgttgatttactcttcaaaacaaatcgaaaagtaaccgttaagcaattaaaagaagattatttcaaaaaaatagaatgttttgatagtgttgaaatttcaggagttgaagatagatttaatgcttcattaggtacctaccatgatttgctaaaaattattaaagataaagattttttggataatgaagaaaatgaagatatcttagaggatattgttttaacattgaccttatttgaagatagggagatgattgaggaaagacttaaaacatatgctcacctctttgatgataaggtgatgaaacagcttaaacgtcgccgttatactggttggggacgtttgtctcgaaaattgattaatggtattagggataagcaatctggcaaaacaatattagattttttgaaatcagatggttttgccaatcgcaattttatgcagctgatccatgatgatagtttgacatttaaagaagacattcaaaaagcacaagtgtctggacaaggcgatagtttacatgaacatattgcaaatttagctggtagccctgctattaaaaaaggtattttacagactgtaaaagttgttgatgaattggtcaaagtaatggggcggcataagccagaaaatatcgttattgaaatggcacgtgaaaatcagacaactcaaaagggccagaaaaattcgcgagagcgtatgaaacgaatcgaagaaggtatcaaagaattaggaagtcagattcttaaagagcatcctgttgaaaatactcaattgcaaaatgaaaagctctatctctattatctccaaaatggaagagacatgtatgtggaccaagaattagatattaatcgtttaagtgattatgatgtcgatcacattgttccacaaagtttccttaaagacgattcaatagacaataaggtcttaacgcgttctgataaaaatcgtggtaaatcggataacgttccaagtgaagaagtagtcaaaaagatgaaaaactattggagacaacttctaaacgccaagttaatcactcaacgtaagtttgataatttaacgaaagctgaacgtggaggtttgagtgaacttgataaagctggttttatcaaacgccaattggttgaaactcgccaaatcactaagcatgtggcacaaattttggatagtcgcatgaatactaaatacgatgaaaatgataaacttattcgagaggttaaagtgattaccttaaaatctaaattagtttctgacttccgaaaagatttccaattctataaagtacgtgagattaacaattaccatcatgcccatgatgcgtatctaaatgccgtcgttggaactgctttgattaagaaatatccaaaacttgaatcggagtttgtctatggtgattataaagtttatgatgttcgtaaaatgattgctaagtctgagcaagaaataggcaaagcaaccgcaaaatatttcttttactctaatatcatgaacttcttcaaaacagaaattacacttgcaaatggagagattcgcaaacgccctctaatcgaaactaatggggaaactggagaaattgtctgggataaagggcgagattttgccacagtgcgcaaagtattgtccatgccccaagtcaatattgtcaagaaaacagaagtacagacaggcggattctccaaggagtcaattttaccaaaaagaaattcggacaagcttattgctcgtaaaaaagactgggatccaaaaaaatatggtggttttgatagtccaacggtagcttattcagtcctagtggttgctaaggtggaaaaagggaaatcgaagaagttaaaatccgttaaagagttactagggatcacaattatggaaagaagttcctttgaaaaaaatccgattgactttttagaagctaaaggatataaggaagttaaaaaagacttaatcattaaactacctaaatatagtctttttgagttagaaaacggtcgtaaacggatgctggctagtgccggagaattacaaaaaggaaatgagctggctctgccaagcaaatatgtgaattttttatatttagctagtcattatgaaaagttgaagggtagtccagaagataacgaacaaaaacaattgtttgtggagcagcataagcattatttagatgagattattgagcaaatcagtgaattttctaagcgtgttattttagcagatgccaatttagataaagttcttagtgcatataacaaacatagagacaaaccaatacgtgaacaagcagaaaatattattcatttatttacgttgacgaatcttggagctcccgctgcttttaaatattttgatacaacaattgatcgtaaacgatatacgtctacaaaagaagttttagatgccactcttatccatcaatccatcactggtctttatgaaacacgcattgatttgagtcagctaggaggtgactga

SEQ ID NO: 238 - protein, 1368 aa, Artificial Sequence
  Description of Artificial Sequence: Synthetic polypeptide
MDKKYSIGLAIGTNSVGWAVITDEYKVPSKKFKVLGNTDRHSIKKNLIGALLFDSGETAEATRLKRTARRRYTRRKNRICYLQEIFSNEMAKVDDSFFHRLEESFLVEEDKKHERHPIFGNIVDEVAYHEKYPTIYHLRKKLVDSTDKADLRLIYLALAHMIKFRGHFLIEGDLNPDNSDVDKLFIQLVQTYNQLFEENPINASGVDAKAILSARLSKSRRLENLIAQLPGEKKNGLFGNLIALSLGLTPNFKSNFDLAEDAKLQLSKDTYDDDLDNLLAQIGDQYADLFLAAKNLSDAILLSDILRVNTEITKAPLSASMIKRYDEHHQDLTLLKALVRQQLPEKYKEIFFDQSKNGYAGYIDGGASQEEFYKFIKPILEKMDGTEELLVKLNREDLLRKQRTFDNGSIPHQIHLGELHAILRRQEDFYPFLKDNREKIEKILTFRIPYYVGPLARGNSRFAWMTRKSEETITPWNFEEVVDKGASAQSFIERMTNFDKNLPNEKVLPKHSLLYEYFTVYNELTKVKYVTEGMRKPAFLSGEQKKAIVDLLFKTNRKVTVKQLKEDYFKKIECFDSVEISGVEDRFNASLGTYHDLLKIIKDKDFLDNEENEDILEDIVLTLTLFEDREMIEERLKTYAHLFDDKVMKQLKRRRYTGWGRLSRKLINGIRDKQSGKTILDFLKSDGFANRNFMQLIHDDSLTFKEDIQKAQVSGQGDSLHEHIANLAGSPAIKKGILQTVKVVDELVKVMGRHKPENIVIEMARENQTTQKGQKNSRERMKRIEEGIKELGSQILKEHPVENTQLQNEKLYLYYLQNGRDMYVDQELDINRLSDYDVDAIVPQSFLKDDSIDNKVLTRSDKNRGKSDNVPSEEVVKKMKNYWRQLLNAKLITQRKFDNLTKAERGGLSELDKAGFIKRQLVETRQITKHVAQILDSRMNTKYDENDKLIREVKVITLKSKLVSDFRKDFQFYKVREINNYHHAHDAYLNAVVGTALIKKYPKLESEFVYGDYKVYDVRKMIAKSEQEIGKATAKYFFYSNIMNFFKTEITLANGEIRKRPLIETNGETGEIVWDKGRDFATVRKVLSMPQVNIVKKTEVQTGGFSKESILPKRNSDKLIARKKDWDPKKYGGFDSPTVAYSVLVVAKVEKGKSKKLKSVKELLGITIMERSSFEKNPIDFLEAKGYKEVKKDLIIKLPKYSLFELENGRKRMLASAGELQKGNELALPSKYVNFLYLASHYEKLKGSPEDNEQKQLFVEQHKHYLDEIIEQISEFSKRVILADANLDKVLSAYNKHRDKPIREQAENIIHLFTLTNLGAPAAFKYFDTTIDRKRYTSTKEVLDATLIHQSITGLYETRIDLSQLGGD

SEQ ID NO: 239 - protein, 345 aa, Sulfolobus islandicus
MEVPLYNIFGDNYIIQVATEAENSTIYNNKVEIDDEELRNVLNLAYKIAKNNEDAAAERRGKAKKKKGEEGETTTSNIILPLSGNDKNPWTETLKCYNFPTTVALSEVFKNFSQVKECEEVSAPSFVKPEFYEFGRSPGMVERTRRVKLEVEPHYLIIAAAGWVLTRLGKAKVSEGDYVGVNVFTPTRGILYSLIQNVNGIVPGIKPETAFGLWIARKVVSSVTNPNVSVVRIYTISDAVGQNPTTINGGFSIDLTKLLEKRYLLSERLEAIARNALSISSNMRERYIVLANYIYEYLTGSKRLEDLLYFANRDLIMNLNSDDGKVRDLKLISAYVNGELIRGEG

SEQ ID NO: 240 - protein, 345 aa, Sulfolobus islandicus
MEVPLYNIFGDNYIIQVATEAENSTIYNNKVEIDDEELRNVLNLAYKIAKNNEDAAAERRGKAKKKKGEEGETTTSNIILPLSGNDKNPWTETLKCYNFPTTVALSEVFKNFSQVKECEEVSAPSFVKPEFYKFGRSPGMVERTRRVKLEVEPHYLIMAAAGWVLTRLGKAKVSEGDYVGVNVFTPTRGILYSLIQNVNGIVPGIKPETAFGLWIARKVVSSVTNPNVSVVSIYTISDAVGQNPTTINGGFSIDLTKLLEKRDLLSERLEAIARNALSISSNMRERYIVLANYIYEYLTGSKRLEDLLYFANRDLIMNLNSDDGKVRDLKLISAYVNGELIRGEG

SEQ ID NO: 241 - protein, 987 aa, Artificial Sequence
  Description of Artificial Sequence: Synthetic polypeptide
MEKRINKIRKKLSADNATKPVSRSGPMKTLLVRVMTDDLKKRLEKRRKKPEVMPQVISNNAANNLRMLLDDYTKMKEAILQVYWQEFKDDHVGLMCKFAQPASKKIDQNKLKPEMDEKGNLTTAGFACSQCGQPLFVYKLEQVSEKGKAYTNYFGRCNVAEHEKLILLAQLKPVKDSDEAVTYSLGKFGQRALDFYSIHVTKESTHPVKPLAQIAGNRYASGPVGKALSDACMGTIASFLSKYQDIIIEHQKVVKGNQKRLESLRELAGKENLEYPSVTLPPQPHTKEGVDFAYNEVIARVRMWVNLNLWQKLKLSRDDAKPLLRLKGFPSFPVVERRENEVDWWNTINEVKKLIDAKRDMGRVFWSGVTAEKRNTILEGYNYLPNENDHKKREGSLENPKKPAKRQFGDLLLYLEKKYAGDWGKVFDEAWERIDKKIAGLTSHIEREEARNAEDAQSKAVLTDWLRAKASFVLERLKEMDEKEFYACEIQLQKWYGDLRGNPFAVEAENRVVDISGFSIGSDGHSIQYRNLLAWKYLENGKREFYLLMNYGKKGRIRFTDGTDIKKSGKWQGLLYGGGKAKVIDLTFDPDDEQLIILPLAFGTRQGREFIWNDLLSLETGLIKLANGRVIEKTIYNKKIGRDEPALFVALTFERREVVDPSNIKPVNLIGVARGENIPAVIALTDPEGCPLPEFKDSSGGPTDILRIGEGYKEKQRAIQAAKEVEQRRAGGYSRKFASKSRNLADDMVRNSARDLFYHAVTHDAVLVFANLSRGFGRQGKRTFMTERQYTKMEDWLTAKLAYEGLTSKTYLSKTLAQYTSKTCSNCGFTITYADMDVMLVRLKKTSDGWATTLNNKELKAEYQITYYNRYKRQTVEKELSAELDRLSEESGNNDISKWTKGRRDEALFLLKKRFSHRPVQEQFVCLDCGHEVHAAEQAALNIARSWLFLNSNSTEFKSYKSGKQPFVGAWQAFYKRRLKEVWKPNA

SEQ ID NO: 242 - protein, 1210 aa, Unknown
  Description of Unknown: uncultured Parcubacteria group bacterium sequence
MSKRHPRISGVKGYRLHAQRLEYTGKSGAMRTIKYPLYSSPSGGRTVPREIVSAINDDYVGLYGLSNFDDLYNAEKRNEEKVYSVLDFWYDCVQYGAVFSYTAPGLLKNVAEVRGGSYELTKTLKGSHLYDELQIDKVIKFLNKKEISRANGSLDKLKKDIIDCFKAEYRERHKDQCNKLADDIKNAKKDAGASLGERQKKLFRDFFGISEQSENDKPSFTNPLNLTCCLLPFDTVNNNRNRGEVLFNKLKEYAQKLDKNEGSLEMWEYIGIGNSGTAFSNFLGEGFLGRLRENKITELKKAMMDITDAWRGQEQEEELEKRLRILAALTIKLREPKFDNHWGGYRSDINGKLSSWLQNYINQTVKIKEDLKGHKKDLKKAKEMINRFGESDTKEEAVVSSLLESIEKIVPDDSADDEKPDIPAIAIYRRFLSDGRLTLNRFVQREDVQEALIKERLEAEKKKKPKKRKKKSDAEDEKETIDFKELFPHLAKPLKLVPNFYGDSKRELYKKYKNAAIYTDALWKAVEKIYKSAFSSSLKNSFFDTDFDKDFFIKRLQKIFSVYRRFNTDKWKPIVKNSFAPYCDIVSLAENEVLYKPKQSRSRKSAAIDKNRVRLPSTENIAKAGIALARELSVAGFDWKDLLKKEEHEEYIDLIELHKTALALLLAVTETQLDISALDFVENGTVKDFMKTRDGNLVLEGRFLEMFSQSIVFSELRGLAGLMSRKEFITRSAIQTMNGKQAELLYIPHEFQSAKITTPKEMSRAFLDLAPAEFATSLEPESLSEKSLLKLKQMRYYPHYFGYELTRTGQGIDGGVAENALRLEKSPVKKREIKCKQYKTLGRGQNKIVLYVRSSYYQTQFLEWFLHRPKNVQTDVAVSGSFLIDEKKVKTRWNYDALTVALEPVSGSERVFVSQPFTIFPEKSAEEEGQRYLGIDIGEYGIAYTALEITGDSAKILDQNFISDPQLKTLREEVKGLKLDQRRGTFAMPSTKIARIRESLVHSLRNRIHHLALKHKAKIVYELEVSRFEEGKQKIKKVYATLKKADVYSEIDADKNLQTTVWGKLAVASEISASYTSQFCGACKKLWRAEMQVDETITTQELIGTVRVIKGGTLIDAIKDFMRPPIFDENDTPFPKYRDFCDKHHISKKMRGNSCLFICPFCRANADADIQASQTIALLRYVKEEKKVEDYFERFRKLKNIKVLGQMKKI

SEQ ID NO: 243 - RNA, 117 nt, Artificial Sequence
  Description of Artificial Sequence: Synthetic polynucleotide
  modified_base (98)..(117): a, c, u, g, unknown or other
guucugucuuuuggucaggacaaccgucuagcuauaagugcugcagggugugagaaacuccuauugcuggacgaugucucuuacgaggcauuagcacnnnnnnnnnnnnnnnnnnnn

SEQ ID NO: 244 - RNA, 108 nt, Artificial Sequence
  Description of Artificial Sequence: Synthetic polynucleotide
  modified_base (89)..(108): a, c, u, g, unknown or other
gaccuauagggucaaugaaucugugcgugugccauaaguaauuaaaaauuacccaccacaggagcaccugaaaacaggugcuuggcacnnnnnnnnnnnnnnnnnnnn

SEQ ID NO: 245 - RNA, 119 nt, Artificial Sequence
  Description of Artificial Sequence: Synthetic polynucleotide
  modified_base (100)..(119): a, c, u, g, unknown or other
gucuaaaggacagaauuuuucaacgggugugccaauggccacuuuccagguggcaaagcccguugaacuucucaaaaagaacgaucugagaaguggcacnnnnnnnnnnnnnnnnnnnn

SEQ ID NO: 246 - protein, 1300 aa, Unknown
  Description of Unknown: Cpf1 polypeptide sequence
MSIYQEFVNKYSLSKTLRFELIPQGKTLENIKARGLILDDEKRAKDYKKAKQIIDKYHQFFIEEILSSVCISEDLLQNYSDVYFKLKKSDDDNLQKDFKSAKDTIKKQISEYIKDSEKFKNLFNQNLIDAKKGQESDLILWLKQSKDNGIELFKANSDITDIDEALEIIKSFKGWTTYFKGFHENRKNVYSSNDIPTSIIYRIVDDNLPKFLENKAKYESLKDKAPEAINYEQIKKDLAEELTFDIDYKTSEVNQRVFSLDEVFEIANFNNYLNQSGITKFNTIIGGKFVNGENTKRKGINEYINLYSQQINDKTLKKYKMSVLFKQILSDTESKSFVIDKLEDDSDVVTTMQSFYEQIAAFKTVEEKSIKETLSLLFDDLKAQKLDLSKIYFKNDKSLTDLSQQVFDDYSVIGTAVLEYITQQIAPKNLDNPSKKEQELIAKKTEKAKYLSLETIKLALEEFNKHRDIDKQCRFEEILANFAAIPMIFDEIAQNKDNLAQISIKYQNQGKKDLLQASAEDDVKAIKDLLDQTNNLLHKLKIFHISQSEDKANILDKDEHFYLVFEECYFELANIVPLYNKIRNYITQKPYSDEKFKLNFENSTLANGWDKNKEPDNTAILFIKDDKYYLGVMNKKNNKIFDDKAIKENKGEGYKKIVYKLLPGANKMLPKVFFSAKSIKFYNPSEDILRIRNHSTHTKNGSPQKGYEKFEFNIEDCRKFIDFYKQSISKHPEWKDFGFRFSDTQRYNSIDEFYREVENQGYKLTFENISESYIDSVVNQGKLYLFQIYNKDFSAYSKGRPNLHTLYWKALFDERNLQDVVYKLNGEAELFYRKQSIPKKITHPAKEAIANKNKDNPKKESVFEYDLIKDKRFTEDKFFFHCPITINFKSSGANKFNDEINLLLKEKANDVHILSIDRGERHLAYYTLVDGKGNIIKQDTFNIIGNDRMKTNYHDKLAAIEKDRDSARKDWKKINNIKEMKEGYLSQVVHEIAKLVIEYNAIVVFEDLNFGFKRGRFKVEKQVYQKLEKMLIEKLNYLVFKDNEFDKTGGVLRAYQLTAPFETFKKMGKQTGIIYYVPAGFTSKICPVTGFVNQLYPKYESVSKSQEFFSKFDKICYNLDKGYFEFSFDYKNFGDKAAKGKWTIASFGSRLINFRNSDKNHNWDTREVYPTKELEKLLKDYSIEYGHGECIKAAICGESDKKFFAKLTSVLNTILQMRNSKTGTELDYLISPVADVNGNFFDSRQAPKNMPQDADANGAYHIGLKGLMLLGRIKNNQEGKKLNLVIKNEEYFEFVQNRNN

SEQ ID NO: 247 - protein, 1300 aa, Artificial Sequence
  Description of Artificial Sequence: Synthetic polypeptide
MSIYQEFVNKYSLSKTLRFELIPQGKTLENIKARGLILDDEKRAKDYKKAKQIIDKYHQFFIEEILSSVCISEDLLQNYSDVYFKLKKSDDDNLQKDFKSAKDTIKKQISEYIKDSEKFKNLFNQNLIDAKKGQESDLILWLKQSKDNGIELFKANSDITDIDEALEIIKSFKGWTTYFKGFHENRKNVYSSNDIPTSIIYRIVDDNLPKFLENKAKYESLKDKAPEAINYEQIKKDLAEELTFDIDYKTSEVNQRVFSLDEVFEIANFNNYLNQSGITKFNTIIGGKFVNGENTKRKGINEYINLYSQQINDKTLKKYKMSVLFKQILSDTESKSFVIDKLEDDSDVVTTMQSFYEQIAAFKTVEEKSIKETLSLLFDDLKAQKLDLSKIYFKNDKSLTDLSQQVFDDYSVIGTAVLEYITQQIAPKNLDNPSKKEQELIAKKTEKAKYLSLETIKLALEEFNKHRDIDKQCRFEEILANFAAIPMIFDEIAQNKDNLAQISIKYQNQGKKDLLQASAEDDVKAIKDLLDQTNNLLHKLKIFHISQSEDKANILDKDEHFYLVFEECYFELANIVPLYNKIRNYITQKPYSDEKFKLNFENSTLANGWDKNKEPDNTAILFIKDDKYYLGVMNKKNNKIFDDKAIKENKGEGYKKIVYKLLPGANKMLPKVFFSAKSIKFYNPSEDILRIRNHSTHTKNGSPQKGYEKFEFNIEDCRKFIDFYKQSISKHPEWKDFGFRFSDTQRYNSIDEFYREVENQGYKLTFENISESYIDSVVNQGKLYLFQIYNKDFSAYSKGRPNLHTLYWKALFDERNLQDVVYKLNGEAELFYRKQSIPKKITHPAKEAIANKNKDNPKKESVFEYDLIKDKRFTEDKFFFHCPITINFKSSGANKFNDEINLLLKEKANDVHILSIARGERHLAYYTLVDGKGNIIKQDTFNIIGNDRMKTNYHDKLAAIEKDRDSARKDWKKINNIKEMKEGYLSQVVHEIAKLVIEYNAIVVFEDLNFGFKRGRFKVEKQVYQKLEKMLIEKLNYLVFKDNEFDKTGGVLRAYQLTAPFETFKKMGKQTGIIYYVPAGFTSKICPVTGFVNQLYPKYESVSKSQEFFSKFDKICYNLDKGYFEFSFDYKNFGDKAAKGKWTIASFGSRLINFRNSDKNHNWDTREVYPTKELEKLLKDYSIEYGHGECIKAAICGESDKKFFAKLTSVLNTILQMRNSKTGTELDYLISPVADVNGNFFDSRQAPKNMPQDADANGAYHIGLKGLMLLGRIKNNQEGKKLNLVIKNEEYFEFVQNRNN

SEQ ID NO: 248 - protein, 1300 aa, Artificial Sequence
  Description of Artificial Sequence: Synthetic polypeptide
MSIYQEFVNKYSLSKTLRFELIPQGKTLENIKARGLILDDEKRAKDYKKAKQIIDKYHQFFIEEILSSVCISEDLLQNYSDVYFKLKKSDDDNLQKDFKSAKDTIKKQISEYIKDSEKFKNLFNQNLIDAKKGQESDLILWLKQSKDNGIELFKANSDITDIDEALEIIKSFKGWTTYFKGFHENRKNVYSSNDIPTSIIYRIVDDNLPKFLENKAKYESLKDKAPEAINYEQIKKDLAEELTFDIDYKTSEVNQRVFSLDEVFEIANFNNYLNQSGITKFNTIIGGKFVNGENTKRKGINEYINLYSQQINDKTLKKYKMSVLFKQILSDTESKSFVIDKLEDDSDVVTTMQSFYEQIAAFKTVEEKSIKETLSLLFDDLKAQKLDLSKIYFKNDKSLTDLSQQVFDDYSVIGTAVLEYITQQIAPKNLDNPSKKEQELIAKKTEKAKYLSLETIKLALEEFNKHRDIDKQCRFEEILANFAAIPMIFDEIAQNKDNLAQISIKYQNQGKKDLLQASAEDDVKAIKDLLDQTNNLLHKLKIFHISQSEDKANILDKDEHFYLVFEECYFELANIVPLYNKIRNYITQKPYSDEKFKLNFENSTLANGWDKNKEPDNTAILFIKDDKYYLGVMNKKNNKIFDDKAIKENKGEGYKKIVYKLLPGANKMLPKVFFSAKSIKFYNPSEDILRIRNHSTHTKNGSPQKGYEKFEFNIEDCRKFIDFYKQSISKHPEWKDFGFRFSDTQRYNSIDEFYREVENQGYKLTFENISESYIDSVVNQGKLYLFQIYNKDFSAYSKGRPNLHTLYWKALFDERNLQDVVYKLNGEAELFYRKQSIPKKITHPAKEAIANKNKDNPKKESVFEYDLIKDKRFTEDKFFFHCPITINFKSSGANKFNDEINLLLKEKANDVHILSIDRGERHLAYYTLVDGKGNIIKQDTFNIIGNDRMKTNYHDKLAAIEKDRDSARKDWKKINNIKEMKEGYLSQVVHEIAKLVIEYNAIVVFADLNFGFKRGRFKVEKQVYQKLEKMLIEKLNYLVFKDNEFDKTGGVLRAYQLTAPFETFKKMGKQTGIIYYVPAGFTSKICPVTGFVNQLYPKYESVSKSQEFFSKFDKICYNLDKGYFEFSFDYKNFGDKAAKGKWTIASFGSRLINFRNSDKNHNWDTREVYPTKELEKLLKDYSIEYGHGECIKAAICGESDKKFFAKLTSVLNTILQMRNSKTGTELDYLISPVADVNGNFFDSRQAPKNMPQDADANGAYHIGLKGLMLLGRIKNNQEGKKLNLVIKNEEYFEFVQNRNN

SEQ ID NO: 249 - protein, 1300 aa, Artificial Sequence
  Description of Artificial Sequence: Synthetic polypeptide
MSIYQEFVNKYSLSKTLRFELIPQGKTLENIKARGLILDDEKRAKDYKKAKQIIDKYHQFFIEEILSSVCISEDLLQNYSDVYFKLKKSDDDNLQKDFKSAKDTIKKQISEYIKDSEKFKNLFNQNLIDAKKGQESDLILWLKQSKDNGIELFKANSDITDIDEALEIIKSFKGWTTYFKGFHENRKNVYSSNDIPTSIIYRIVDDNLPKFLENKAKYESLKDKAPEAINYEQIKKDLAEELTFDIDYKTSEVNQRVFSLDEVFEIANFNNYLNQSGITKFNTIIGGKFVNGENTKRKGINEYINLYSQQINDKTLKKYKMSVLFKQILSDTESKSFVIDKLEDDSDVVTTMQSFYEQIAAFKTVEEKSIKETLSLLFDDLKAQKLDLSKIYFKNDKSLTDLSQQVFDDYSVIGTAVLEYITQQIAPKNLDNPSKKEQELIAKKTEKAKYLSLETIKLALEEFNKHRDIDKQCRFEEILANFAAIPMIFDEIAQNKDNLAQISIKYQNQGKKDLLQASAEDDVKAIKDLLDQTNNLLHKLKIFHISQSEDKANILDKDEHFYLVFEECYFELANIVPLYNKIRNYITQKPYSDEKFKLNFENSTLANGWDKNKEPDNTAILFIKDDKYYLGVMNKKNNKIFDDKAIKENKGEGYKKIVYKLLPGANKMLPKVFFSAKSIKFYNPSEDILRIRNHSTHTKNGSPQKGYEKFEFNIEDCRKFIDFYKQSISKHPEWKDFGFRFSDTQRYNSIDEFYREVENQGYKLTFENISESYIDSVVNQGKLYLFQIYNKDFSAYSKGRPNLHTLYWKALFDERNLQDVVYKLNGEAELFYRKQSIPKKITHPAKEAIANKNKDNPKKESVFEYDLIKDKRFTEDKFFFHCPITINFKSSGANKFNDEINLLLKEKANDVHILSIDRGERHLAYYTLVDGKGNIIKQDTFNIIGNDRMKTNYHDKLAAIEKDRDSARKDWKKINNIKEMKEGYLSQVVHEIAKLVIEYNAIVVFEDLNFGFKRGRFKVEKQVYQKLEKMLIEKLNYLVFKDNEFDKTGGVLRAYQLTAPFETFKKMGKQTGIIYYVPAGFTSKICPVTGFVNQLYPKYESVSKSQEFFSKFDKICYNLDKGYFEFSFDYKNFGDKAAKGKWTIASFGSRLINFRNSDKNHNWDTREVYPTKELEKLLKDYSIEYGHGECIKAAICGESDKKFFAKLTSVLNTILQMRNSKTGTELDYLISPVADVNGNFFDSRQAPKNMPQDAAANGAYHIGLKGLMLLGRIKNNQEGKKLNLVIKNEEYFEFVQNRNN

SEQ ID NO: 250 - protein, 1300 aa, Artificial Sequence
  Description of Artificial Sequence: Synthetic polypeptide
MSIYQEFVNKYSLSKTLRFELIPQGKTLENIKARGLILDDEKRAKDYKKAKQIIDKYHQFFIEEILSSVCISEDLLQNYSDVYFKLKKSDDDNLQKDFKSAKDTIKKQISEYIKDSEKFKNLFNQNLIDAKKGQESDLILWLKQSKDNGIELFKANSDITDIDEALEIIKSFKGWTTYFKGFHENRKNVYSSNDIPTSIIYRIVDDNLPKFLENKAKYESLKDKAPEAINYEQIKKDLAEELTFDIDYKTSEVNQRVFSLDEVFEIANFNNYLNQSGITKFNTIIGGKFVNGENTKRKGINEYINLYSQQINDKTLKKYKMSVLFKQILSDTESKSFVIDKLEDDSDVVTTMQSFYEQIAAFKTVEEKSIKETLSLLFDDLKAQKLDLSKIYFKNDKSLTDLSQQVFDDYSVIGTAVLEYITQQIAPKNLDNPSKKEQELIAKKTEKAKYLSLETIKLALEEFNKHRDIDKQCRFEEILANFAAIPMIFDEIAQNKDNLAQISIKYQNQGKKDLLQASAEDDVKAIKDLLDQTNNLLHKLKIFHISQSEDKANILDKDEHFYLVFEECYFELANIVPLYNKIRNYITQKPYSDEKFKLNFENSTLANGWDKNKEPDNTAILFIKDDKYYLGVMNKKNNKIFDDKAIKENKGEGYKKIVYKLLPGANKMLPKVFFSAKSIKFYNPSEDILRIRNHSTHTKNGSPQKGYEKFEFNIEDCRKFIDFYKQSISKHPEWKDFGFRFSDTQRYNSIDEFYREVENQGYKLTFENISESYIDSVVNQGKLYLFQIYNKDFSAYSKGRPNLHTLYWKALFDERNLQDVVYKLNGEAELFYRKQSIPKKITHPAKEAIANKNKDNPKKESVFEYDLIKDKRFTEDKFFFHCPITINFKSSGANKFNDEINLLLKEKANDVHILSIARGERHLAYYTLVDGKGNIIKQDTFNIIGNDRMKTNYHDKLAAIEKDRDSARKDWKKINNIKEMKEGYLSQVVHEIAKLVIEYNAIVVFADLNFGFKRGRFKVEKQVYQKLEKMLIEKLNYLVFKDNEFDKTGGVLRAYQLTAPFETFKKMGKQTGIIYYVPAGFTSKICPVTGFVNQLYPKYESVSKSQEFFSKFDKICYNLDKGYFEFSFDYKNFGDKAAKGKWTIASFGSRLINFRNSDKNHNWDTREVYPTKELEKLLKDYSIEYGHGECIKAAICGESDKKFFAKLTSVLNTILQMRNSKTGTELDYLISPVADVNGNFFDSRQAPKNMPQDADANGAYHIGLKGLMLLGRIKNNQEGKKLNLVIKNEEYFEFVQNRNN

SEQ ID NO: 251 - protein, 1300 aa, Artificial Sequence
  Description of Artificial Sequence: Synthetic polypeptide
MSIYQEFVNKYSLSKTLRFELIPQGKTLENIKARGLILDDEKRAKDYKKAKQIIDKYHQFFIEEILSSVCISEDLLQNYSDVYFKLKKSDDDNLQKDFKSAKDTIKKQISEYIKDSEKFKNLFNQNLIDAKKGQESDLILWLKQSKDNGIELFKANSDITDIDEALEIIKSFKGWTTYFKGFHENRKNVYSSNDIPTSIIYRIVDDNLPKFLENKAKYESLKDKAPEAINYEQIKKDLAEELTFDIDYKTSEVNQRVFSLDEVFEIANFNNYLNQSGITKFNTIIGGKFVNGENTKRKGINEYINLYSQQINDKTLKKYKMSVLFKQILSDTESKSFVIDKLEDDSDVVTTMQSFYEQIAAFKTVEEKSIKETLSLLFDDLKAQKLDLSKIYFKNDKSLTDLSQQVFDDYSVIGTAVLEYITQQIAPKNLDNPSKKEQELIAKKTEKAKYLSLETIKLALEEFNKHRDIDKQCRFEEILANFAAIPMIFDEIAQNKDNLAQISIKYQNQGKKDLLQASAEDDVKAIKDLLDQTNNLLHKLKIFHISQSEDKANILDKDEHFYLVFEECYFELANIVPLYNKIRNYITQKPYSDEKFKLNFENSTLANGWDKNKEPDNTAILFIKDDKYYLGVMNKKNNKIFDDKAIKENKGEGYKKIVYKLLPGANKMLPKVFFSAKSIKFYNPSEDILRIRNHSTHTKNGSPQKGYEKFEFNIEDCRKFIDFYKQSISKHPEWKDFGFRFSDTQRYNSIDEFYREVENQGYKLTFENISESYIDSVVNQGKLYLFQIYNKDFSAYSKGRPNLHTLYWKALFDERNLQDVVYKLNGEAELFYRKQSIPKKITHPAKEAIANKNKDNPKKESVFEYDLIKDKRFTEDKFFFHCPITINFKSSGANKFNDEINLLLKEKANDVHILSIARGERHLAYYTLVDGKGNIIKQDTFNIIGNDRMKTNYHDKLAAIEKDRDSARKDWKKINNIKEMKEGYLSQVVHEIAKLVIEYNAIVVFEDLNFGFKRGRFKVEKQVYQKLEKMLIEKLNYLVFKDNEFDKTGGVLRAYQLTAPFETFKKMGKQTGIIYYVPAGFTSKICPVTGFVNQLYPKYESVSKSQEFFSKFDKICYNLDKGYFEFSFDYKNFGDKAAKGKWTIASFGSRLINFRNSDKNHNWDTREVYPTKELEKLLKDYSIEYGHGECIKAAICGESDKKFFAKLTSVLNTILQMRNSKTGTELDYLISPVADVNGNFFDSRQAPKNMPQDAAANGAYHIGLKGLMLLGRIKNNQEGKKLNLVIKNEEYFEFVQNRNN

SEQ ID NO: 252 - protein, 1300 aa, Artificial Sequence
  Description of Artificial Sequence: Synthetic polypeptide
MSIYQEFVNKYSLSKTLRFELIPQGKTLENIKARGLILDDEKRAKDYKKAKQIIDKYHQFFIEEILSSVCISEDLLQNYSDVYFKLKKSDDDNLQKDFKSAKDTIKKQISEYIKDSEKFKNLFNQNLIDAKKGQESDLILWLKQSKDNGIELFKANSDITDIDEALEIIKSFKGWTTYFKGFHENRKNVYSSNDIPTSIIYRIVDDNLPKFLENKAKYESLKDKAPEAINYEQIKKDLAEELTFDIDYKTSEVNQRVFSLDEVFEIANFNNYLNQSGITKFNTIIGGKFVNGENTKRKGINEYINLYSQQINDKTLKKYKMSVLFKQILSDTESKSFVIDKLEDDSDVVTTMQSFYEQIAAFKTVEEKSIKETLSLLFDDLKAQKLDLSKIYFKNDKSLTDLSQQVFDDYSVIGTAVLEYITQQIAPKNLDNPSKKEQELIAKKTEKAKYLSLETIKLALEEFNKHRDIDKQCRFEEILANFAAIPMIFDEIAQNKDNLAQISIKYQNQGKKDLLQASAEDDVKAIKDLLDQTNNLLHKLKIFHISQSEDKANILDKDEHFYLVFEECYFELANIVPLYNKIRNYITQKPYSDEKFKLNFENSTLANGWDKNKEPDNTAILFIKDDKYYLGVMNKKNNKIFDDKAIKENKGEGYKKIVYKLLPGANKMLPKVFFSAKSIKFYNPSEDILRIRNHSTHTKNGSPQKGYEKFEFNIEDCRKFIDFYKQSISKHPEWKDFGFRFSDTQRYNSIDEFYREVENQGYKLTFENISESYIDSVVNQGKLYLFQIYNKDFSAYSKGRPNLHTLYWKALFDERNLQDVVYKLNGEAELFYRKQSIPKKITHPAKEAIANKNKDNPKKESVFEYDLIKDKRFTEDKFFFHCPITINFKSSGANKFNDEINLLLKEKANDVHILSIDRGERHLAYYTLVDGKGNIIKQDTFNIIGNDRMKTNYHDKLAAIEKDRDSARKDWKKINNIKEMKEGYLSQVVHEIAKLVIEYNAIVVFADLNFGFKRGRFKVEKQVYQKLEKMLIEKLNYLVFKDNEFDKTGGVLRAYQLTAPFETFKKMGKQTGIIYYVPAGFTSKICPVTGFVNQLYPKYESVSKSQEFFSKFDKICYNLDKGYFEFSFDYKNFGDKAAKGKWTIASFGSRLINFRNSDKNHNWDTREVYPTKELEKLLKDYSIEYGHGECIKAAICGESDKKFFAKLTSVLNTILQMRNSKTGTELDYLISPVADVNGNFFDSRQAPKNMPQDAAANGAYHIGLKGLMLLGRIKNNQEGKKLNLVIKNEEYFEFVQNRNN

SEQ ID NO: 253 - protein, 1300 aa, Artificial Sequence
  Description of Artificial Sequence: Synthetic polypeptide
MSIYQEFVNKYSLSKTLRFELIPQGKTLENIKARGLILDDEKRAKDYKKAKQIIDKYHQFFIEEILSSVCISEDLLQNYSDVYFKLKKSDDDNLQKDFKSAKDTIKKQISEYIKDSEKFKNLFNQNLIDAKKGQESDLILWLKQSKDNGIELFKANSDITDIDEALEIIKSFKGWTTYFKGFHENRKNVYSSNDIPTSIIYRIVDDNLPKFLENKAKYESLKDKAPEAINYEQIKKDLAEELTFDIDYKTSEVNQRVFSLDEVFEIANFNNYLNQSGITKFNTIIGGKFVNGENTKRKGINEYINLYSQQINDKTLKKYKMSVLFKQILSDTESKSFVIDKLEDDSDVVTTMQSFYEQIAAFKTVEEKSIKETLSLLFDDLKAQKLDLSKIYFKNDKSLTDLSQQVFDDYSVIGTAVLEYITQQIAPKNLDNPSKKEQELIAKKTEKAKYLSLETIKLALEEFNKHRDIDKQCRFEEILANFAAIPMIFDEIAQNKDNLAQISIKYQNQGKKDLLQASAEDDVKAIKDLLDQTNNLLHKLKIFHISQSEDKANILDKDEHFYLVFEECYFELANIVPLYNKIRNYITQKPYSDEKFKLNFENSTLANGWDKNKEPDNTAILFIKDDKYYLGVMNKKNNKIFDDKAIKENKGEGYKKIVYKLLPGANKMLPKVFFSAKSIKFYNPSEDILRIRNHSTHTKNGSPQKGYEKFEFNIEDCRKFIDFYKQSISKHPEWKDFGFRFSDTQRYNSIDEFYREVENQGYKLTFENISESYIDSVVNQGKLYLFQIYNKDFSAYSKGRPNLHTLYWKALFDERNLQDVVYKLNGEAELFYRKQSIPKKITHPAKEAIANKNKDNPKKESVFEYDLIKDKRFTEDKFFFHCPITINFKSSGANKFNDEINLLLKEKANDVHILSIARGERHLAYYTLVDGKGNIIKQDTFNIIGNDRMKTNYHDKLAAIEKDRDSARKDWKKINNIKEMKEGYLSQVVHEIAKLVIEYNAIVVFADLNFGFKRGRFKVEKQVYQKLEKMLIEKLNYLVFKDNEFDKTGGVLRAYQLTAPFETFKKMGKQTGIIYYVPAGFTSKICPVTGFVNQLYPKYESVSKSQEFFSKFDKICYNLDKGYFEFSFDYKNFGDKAAKGKWTIASFGSRLINFRNSDKNHNWDTREVYPTKELEKLLKDYSIEYGHGECIKAAICGESDKKFFAKLTSVLNTILQMRNSKTGTELDYLISPVADVNGNFFDSRQAPKNMPQDAAANGAYHIGLKGLMLLGRIKNNQEGKKLNLVIKNEEYFEFVQNRNN

SEQ ID NO: 254 - protein, 1052 aa, Artificial Sequence
  Description of Artificial Sequence: Synthetic polypeptide
KRNYILGLDIGITSVGYGIIDYETRDVIDAGVRLFKEANVENNEGRRSKRGARRLKRRRRHRIQRVKKLLFDYNLLTDHSELSGINPYEARVKGLSQKLSEEEFSAALLHLAKRRGVHNVNEVEEDTGNELSTKEQISRNSKALEEKYVAELQLERLKKDGEVRGSINRFKTSDYVKEAKQLLKVQKAYHQLDQSFIDTYIDLLETRRTYYEGPGEGSPFGWKDIKEWYEMLMGHCTYFPEELRSVKYAYNADLYNALNDLNNLVITRDENEKLEYYEKFQIIENVFKQKKKPTLKQIAKEILVNEEDIKGYRVTSTGKPEFTNLKVYHDIKDITARKEIIENAELLDQIAKILTIYQSSEDIQEELTNLNSELTQEEIEQISNLKGYTGTHNLSLKAINLILDELWHTNDNQIAIFNRLKLVPKKVDLSQQKEIPTTLVDDFILSPVVKRSFIQSIKVINAIIKKYGLPNDIIIELAREKNSKDAQKMINEMQKRNRQTNERIEEIIRTTGKENAKYLIEKIKLHDMQEGKCLYSLEAIPLEDLLNNPFNYEVDHIIPRSVSFDNSFNNKVLVKQEENSKKGNRTPFQYLSSSDSKISYETFKKHILNLAKGKGRISKTKKEYLLEERDINRFSVQKDFINRNLVDTRYATRGLMNLLRSYFRVNNLDVKVKSINGGFTSFLRRKWKFKKERNKGYKHHAEDALIIANADFIFKEWKKLDKAKKVMENQMFEEKQAESMPEIETEQEYKEIFITPHQIKHIKDFKDYKYSHRVDKKPNRELINDTLYSTRKDDKGNTLIVNNLNGLYDKDNDKLKKLINKSPEKLLMYHHDPQTYQKLKLIMEQYGDEKNPLYKYYEETGNYLTKYSKKDNGPVIKKIKYYGNKLNAHLDITDDYPNSRNKVVKLSLKPYRFDVYLDNGVYKFVTVKNLDVIKKENYYEVNSKCYEEAKKLKKISNQAEFIASFYNNDLIKINGELYRVIGVNNDLLNRIEVNMIDITYREYLENMNDKRPPRIIKTIASKTQSIKKYSTDILGNLYEVKSKKHPQIIKKG

SEQ ID NO: 255 - protein, 1052 aa, Artificial Sequence
  Description of Artificial Sequence: Synthetic polypeptide
KRNYILGLDIGITSVGYGIIDYETRDVIDAGVRLFKEANVENNEGRRSKRGARRLKRRRRHRIQRVKKLLFDYNLLTDHSELSGINPYEARVKGLSQKLSEEEFSAALLHLAKRRGVHNVNEVEEDTGNELSTKEQISRNSKALEEKYVAELQLERLKKDGEVRGSINRFKTSDYVKEAKQLLKVQKAYHQLDQSFIDTYIDLLETRRTYYEGPGEGSPFGWKDIKEWYEMLMGHCTYFPEELRSVKYAYNADLYNALNDLNNLVITRDENEKLEYYEKFQIIENVFKQKKKPTLKQIAKEILVNEEDIKGYRVTSTGKPEFTNLKVYHDIKDITARKEIIENAELLDQIAKILTIYQSSEDIQEELTNLNSELTQEEIEQISNLKGYTGTHNLSLKAINLILDELWHTNDNQIAIFNRLKLVPKKVDLSQQKEIPTTLVDDFILSPVVKRSFIQSIKVINAIIKKYGLPNDIIIELAREKNSKDAQKMINEMQKRNRQTNERIEEIIRTTGKENAKYLIEKIKLHDMQEGKCLYSLEAIPLEDLLNNPFNYEVDHIIPRSVSFDNSFNNKVLVKQEEASKKGNRTPFQYLSSSDSKISYETFKKHILNLAKGKGRISKTKKEYLLEERDINRFSVQKDFINRNLVDTRYATRGLMNLLRSYFRVNNLDVKVKSINGGFTSFLRRKWKFKKERNKGYKHHAEDALIIANADFIFKEWKKLDKAKKVMENQMFEEKQAESMPEIETEQEYKEIFITPHQIKHIKDFKDYKYSHRVDKKPNRELINDTLYSTRKDDKGNTLIVNNLNGLYDKDNDKLKKLINKSPEKLLMYHHDPQTYQKLKLIMEQYGDEKNPLYKYYEETGNYLTKYSKKDNGPVIKKIKYYGNKLNAHLDITDDYPNSRNKVVKLSLKPYRFDVYLDNGVYKFVTVKNLDVIKKENYYEVNSKCYEEAKKLKKISNQAEFIASFYNNDLIKINGELYRVIGVNNDLLNRIEVNMIDITYREYLENMNDKRPPRIIKTIASKTQSIKKYSTDILGNLYEVKSKKHPQIIKKG

SEQ ID NO: 256 - protein, 1052 aa, Artificial Sequence
  Description of Artificial Sequence: Synthetic polypeptide
KRNYILGLDIGITSVGYGIIDYETRDVIDAGVRLFKEANVENNEGRRSKRGARRLKRRRRHRIQRVKKLLFDYNLLTDHSELSGINPYEARVKGLSQKLSEEEFSAALLHLAKRRGVHNVNEVEEDTGNELSTKEQISRNSKALEEKYVAELQLERLKKDGEVRGSINRFKTSDYVKEAKQLLKVQKAYHQLDQSFIDTYIDLLETRRTYYEGPGEGSPFGWKDIKEWYEMLMGHCTYFPEELRSVKYAYNADLYNALNDLNNLVITRDENEKLEYYEKFQIIENVFKQKKKPTLKQIAKEILVNEEDIKGYRVTSTGKPEFTNLKVYHDIKDITARKEIIENAELLDQIAKILTIYQSSEDIQEELTNLNSELTQEEIEQISNLKGYTGTHNLSLKAINLILDELWHTNDNQIAIFNRLKLVPKKVDLSQQKEIPTTLVDDFILSPVVKRSFIQSIKVINAIIKKYGLPNDIIIELAREKNSKDAQKMINEMQKRNRQTNERIEEIIRTTGKENAKYLIEKIKLHDMQEGKCLYSLEAIPLEDLLNNPFNYEVDHIIPRSVSFDNSFNNKVLVKQEEASKKGNRTPFQYLSSSDSKISYETFKKHILNLAKGKGRISKTKKEYLLEERDINRFSVQKDFINRNLVDTRYATRGLMNLLRSYFRVNNLDVKVKSINGGFTSFLRRKWKFKKERNKGYKHHAEDALIIANADFIFKEWKKLDKAKKVMENQMFEEKQAESMPEIETEQEYKEIFITPHQIKHIKDFKDYKYSHRVDKKPNRKLINDTLYSTRKDDKGNTLIVNNLNGLYDKDNDKLKKLINKSPEKLLMYHHDPQTYQKLKLIMEQYGDEKNPLYKYYEETGNYLTKYSKKDNGPVIKKIKYYGNKLNAHLDITDDYPNSRNKVVKLSLKPYRFDVYLDNGVYKFVTVKNLDVIKKENYYEVNSKCYEEAKKLKKISNQAEFIASFYKNDLIKINGELYRVIGVNNDLLNRIEVNMIDITYREYLENMNDKRPPHIIKTIASKTQSIKKYSTDILGNLYEVKSKKHPQIIKKG

SEQ ID NO: 257 - protein, 1410 aa, Artificial Sequence
  Description of Artificial Sequence: Synthetic polypeptide
EIGKATAKYFFYSNIMNFFKTEITLANGEIRKRPLIETNGETGEIVWDKGRDFATVRKVLSMPQVNIVKKTEVQTGGFSKESILPKRNSDKLIARKKDWDPKKYGGFMQPTVAYSVLVVAKVEKGKSKKLKSVKELLGITIMERSSFEKNPIDFLEAKGYKEVKKDLIIKLPKYSLFELENGRKRMLASAKFLQKGNELALPSKYVNFLYLASHYEKLKGSPEDNEQKQLFVEQHKHYLDEIIEQISEFSKRVILADANLDKVLSAYNKHRDKPIREQAENIIHLFTLTNLGAPRAFKYFDTTIARKEYRSTKEVLDATLIHQSITGLYETRIDLSQLGGDGGSGGSGGSGGSGGSGGSGGMDKKYSIGLAIGTNSVGWAVITDEYKVPSKKFKVLGNTDRHSIKKNLIGALLFDSGETAEATRLKRTARRRYTRRKNRICYLQEIFSNEMAKVDDSFFHRLEESFLVEEDKKHERHPIFGNIVDEVAYHEKYPTIYHLRKKLVDSTDKADLRLIYLALAHMIKFRGHFLIEGDLNPDNSDVDKLFIQLVQTYNQLFEENPINASGVDAKAILSARLSKSRRLENLIAQLPGEKKNGLFGNLIALSLGLTPNFKSNFDLAEDAKLQLSKDTYDDDLDNLLAQIGDQYADLFLAAKNLSDAILLSDILRVNTEITKAPLSASMIKRYDEHHQDLTLLKALVRQQLPEKYKEIFFDQSKNGYAGYIDGGASQEEFYKFIKPILEKMDGTEELLVKLNREDLLRKQRTFDNGSIPHQIHLGELHAILRRQEDFYPFLKDNREKIEKILTFRIPYYVGPLARGNSRFAWMTRKSEETITPWNFEEVVDKGASAQSFIERMTNFDKNLPNEKVLPKHSLLYEYFTVYNELTKVKYVTEGMRKPAFLSGEQKKAIVDLLFKTNRKVTVKQLKEDYFKKIECFDSVEISGVEDRFNASLGTYHDLLKIIKDKDFLDNEENEDILEDIVLTLTLFEDREMIEERLKTYAHLFDDKVMKQLKRRRYTGWGRLSRKLINGIRDKQSGKTILDFLKSDGFANRNFMQLIHDDSLTFKEDIQKAQVSGQGDSLHEHIANLAGSPAIKKGILQTVKVVDELVKVMGRHKPENIVIEMARENQTTQKGQKNSRERMKRIEEGIKELGSQILKEHPVENTQLQNEKLYLYYLQNGRDMYVDQELDINRLSDYDVDHIVPQSFLKDDSIDNKVLTRSDKNRGKSDNVPSEEVVKKMKNYWRQLLNAKLITQRKFDNLTKAERGGLSELDKAGFIKRQLVETRQITKHVAQILDSRMNTKYDENDKLIREVKVITLKSKLVSDFRKDFQFYKVREINNYHHAHDAYLNAVVGTALIKKYPKLESEFVYGDYKVYDVRKMIAKSEQEGADKRTADGSEFESPKKKRKV

SEQ ID NO: 258 - protein, 1129 aa, Artificial Sequence
  Description of Artificial Sequence: Synthetic polypeptide
MAVKSIKVKLRLDDMPEIRAGLWKLHKEVNAGVRYYTEWLSLLRQENLYRRSPNGDGEQECDKTAEECKAELLERLRARQVENGHRGPAGSDDELLQLARQLYELLVPQAIGAKGDAQQIARKFLSPLADKDAVGGLGIAKAGNKPRWVRMREAGEPGWEEEKEKAETRKSADRTADVLRALADFGLKPLMRVYTDSEMSSVEWKPLRKGQAVRTWDRDMFQQAIERMMSWESWNQRVGQEYAKLVEQKNRFEQKNFVGQEHLVHLVNQLQQDMKEASPGLESKEQTAHYVTGRALRGSDKVFEKWGKLAPDAPFDLYDAEIKNVQRRNTRRFGSHDLFAKLAEPEYQALWREDASFLTRYAVYNSILRKLNHAKMFATFTLPDATAHPIWTRFDKLGGNLHQYTFLFNEFGERRHAIRFHKLLKVENGVAREVDDVTVPISMSEQLDNLLPRDPNEPIALYFRDYGAEQHFTGEFGGAKIQCRRDQLAHMHRRRGARDVYLNVSVRVQSQSEARGERRPPYAAVFRLVGDNHRAFVHFDKLSDYLAEHPDDGKLGSEGLLSGLRVMSVDLGLRTSASISVFRVARKDELKPNSKGRVPFFFPIKGNDNLVAVHERSQLLKLPGETESKDLRAIREERQRTLRQLRTQLAYLRLLVRCGSEDVGRRERSWAKLIEQPVDAANHMTPDWREAFENELQKLKSLHGICSDKEWMDAVYESVRRVWRHMGKQVRDWRKDVRSGERPKIRGYAKDVVGGNSIEQIEYLERQYKFLKSWSFFGKVSGQVIRAEKGSRFAITLREHIDHAKEDRLKKLADRIIMEALGYVYALDERGKGKWVAKYPPCQLILLEELSEYQFNNDRPPSENNQLMQWSHRGVFQELINQAQVHDLLVGTMYAAFSSRFDARTGAPGIRCRRVPARCTQEHNPEPFPWWLNKFVVEHTLDACPLRADDLIPTGEGEIFVSPFSAEEGDFHQIHADLNAAQNLQQRLWSDFDISQIRLRCDWGEVDGELVLIPRLTGKRTADSYSNKVFYTNTGVTYYERERGKKRRKVFAQEKLSEEEAELLVEADEAREKSVVLMRDPSGIINRGNWTRQKEFWSMVNQRIEGYLVKQIRSRVPLQDSACENTGDI

SEQ ID NO: 259 - protein, 1129 aa, Artificial Sequence
  Description of Artificial Sequence: Synthetic polypeptide
MAVKSMKVKLRLDNMPEIRAGLWKLHTEVNAGVRYYTEWLSLLRQENLYRRSPNGDGEQECYKTAEECKAELLERLRARQVENGHCGPAGSDDELLQLARQLYELLVPQAIGAKGDAQQIARKFLSPLADKDAVGGLGIAKAGNKPRWVRMREAGEPGWEEEKAKAEARKSTDRTADVLRALADFGLKPLMRVYTDSDMSSVQWKPLRKGQAVRTWDRDMFQQAIERMMSWESWNQRVGEAYAKLVEQKSRFEQKNFVGQEHLVQLVNQLQQDMKEASHGLESKEQTAHYLTGRALRGSDKVFEKWEKLDPDAPFDLYDTEIKNVQRRNTRRFGSHDLFAKLAEPKYQALWREDASFLTRYAVYNSIVRKLNHAKMFATFTLPDATAHPIWTRFDKLGGNLHQYTFLFNEFGEGRHAIRFQKLLTVEDGVAKEVDDVTVPISMSAQLDDLLPRDPHELVALYFQDYGAEQHLAGEFGGAKIQYRRDQLNHLHARRGARDVYLNLSVRVQSQSEARGERRPPYAAVFRLVGDNHRAFVHFDKLSDYLAEHPDDGKLGSEGLLSGLRVMSVDLGLRTSASISVFRVARKDELKPNSEGRVPFCFPIEGNENLVAVHERSQLLKLPGETESKDLRAIREERQRTLRQLRTQLAYLRLLVRCGSEDVGRRERSWAKLIEQPMDANQMTPDWREAFEDELQKLKSLYGICGDREWTEAVYESVRRVWRHMGKQVRDWRKDVRSGERPKIRGYQKDVVGGNSIEQIEYLERQYKFLKSWSFFGKVSGQVIRAEKGSRFAITLREHIDHAKEDRLKKLADRIIMEALGYVYALDDERGKGKWVAKYPPCQLILLEELSEYQFNNDRPPSENNQLMQWSHRGVFQELLNQAQVHDLLVGTMYAAFSSRFDARTGAPGIRCRRVPARCAREQNPEPFPWWLNKFVAEHKLDGCPLRADDLIPTGEGEFFVSPFSAEEGDFHQIHADLNAAQNLQRRLWSDFDISQIRLRCDWGEVDGEPVLIPRTTGKRTADSYGNKVFYTKTGVTYYERERGKKRRKVFAQEELSEEEAELLVEADEAREKSVVLMRDPSGIINRGDWTRQKEFWSMVNQRIEGYLVKQIRSRVRLQESACENTGDI

SEQ ID NO: 260 - protein, 1140 aa, Artificial Sequence
  Description of Artificial Sequence: Synthetic polypeptide
MAPKKKRKVGIHGVPAAATRSFILKIEPNEEVKKGLWKTHEVLNHGIAYYMNILKLIRQEAIYEHHEQDPKNPKKVSKAEIQAELWDFVLKMQKCNSFTHEVDKDEVFNILRELYEELVPSSVEKKGEANQLSNKFLYPLVDPNSQSGKGTASSGRKPRWYNLKIAGDPSWEEEKKKWEEDKKKDPLAKILGKLAEYGLIPLFIPYTDSNEPIVKEIKWMEKSRNQSVRRLDKDMFIQALERFLSWESWNLKVKEEYEKVEKEYKTLEERIKEDIQALKALEQYEKERQEQLLRDTLNTNEYRLSKRGLRGWREIIQKWLKMDENEPSEKYLEVFKDYQRKHPREAGDYSVYEFLSKKENHFIWRNHPEYPYLYATFCEIDKKKKDAKQQATFTLADPINHPLWVRFEERSGSNLNKYRILTEQLHTEKLKKKLTVQLDRLIYPTESGGWEEKGKVDIVLLPSRQFYNQIFLDIEEKGKHAFTYKDESIKFPLKGTLGGARVQFDRDHLRRYPHKVESGNVGRIYFNMTVNIEPTESPVSKSLKIHRDDFPKVVNFKPKELTEWIKDSKGKKLKSGIESLEIGLRVMSIDLGQRQAAAASIFEVVDQKPDIEGKLFFPIKGTELYAVHRASFNIKLPGETLVKSREVLRKAREDNLKLMNQKLNFLRNVLHFQQFEDITEREKRVTKWISRQENSDVPLVYQDELIQIRELMYKPYKDWVAFLKQLHKRLEVEIGKEVKHWRKSLSDGRKGLYGISLKNIDEIDRTRKFLLRWSLRPTEPGEVRRLEPGQRFAIDQLNHLNALKEDRLKKMANTIIMHALGYCYDVRKKKWQAKNPACQIILFEDLSNYNPYEERSRFENSKLMKWSRREIPRQVALQGEIYGLQVGEVGAQFSSRFHAKTGSPGIRCSVVTKEKLQDNRFFKNLQREGRLTLDKIAVLKEGDLYPDKGGEKFISLSKDRKCVTTHADINAAQNLQKRFWTRTHGFYKVYCKAYQVDGQTVYIPESKDQKQKIIEEFGEGYFILKDGVYEWVNAGKLKIKKGSSKQSSSELVDSDILKDSFDLASELKGEKLMLYRDPSGNVFPSDKWMAAGVFFGKLERILISKLTNQYSISTIEDDSSKQSMKRPAATKKAGQAKKKK

SEQ ID NO: 261 - DNA, 47 bp, Artificial Sequence
  Description of Artificial Sequence: Synthetic oligonucleotide
gggaaataagagagaaaagaagagtaagaagaaatataagagccacc

SEQ ID NO: 262 - DNA, 101 bp, Artificial Sequence
  Description of Artificial Sequence: Synthetic polynucleotide
gctggagcctcggtggccatgcttcttgccccttgggcctccccccagcccctcctccccttcctgcacccgtacccccgtggtctttgaataaagtctga

SEQ ID NO: 263 - DNA, 3420 bp, Artificial Sequence
  Description of Artificial Sequence: Synthetic polynucleotide
atggccccaaagaagaagcggaaggtcggtatccacggagtcccagcagccgccaccagatccttcatcctgaagatcgagcccaacgaggaagtgaagaaaggcctctggaaaacccacgaggtgctgaaccacggaatcgcctactacatgaatatcctgaagctgatccggcaagaggccatctacgagcaccacgagcaggaccccaagaatcccaagaaggtgtccaaggccgagatccaggccgagctgtgggatttcgtgctgaagatgcagaagtgcaacagcttcacacacgaggtggacaaggacgaggtgttcaacatcctgagagagctgtacgaggaactggtgcccagcagcgtggaaaagaagggcgaagccaaccagctgagcaacaagtttctgtaccctctggtggaccccaacagccagtctggaaagggaacagccagcagcggcagaaagcccagatggtacaacctgaagattgccggcgatccctcctgggaagaagagaagaagaagtgggaagaagataagaaaaaggacccgctggccaagatcctgggcaagctggctgagtacggactgatccctctgttcatcccctacaccgacagcaacgagcccatcgtgaaagaaatcaagtggatggaaaagtcccggaaccagagcgtgcggcggctggataaggacatgttcattcaggccctggaacggttcctgagctgggagagctggaacctgaaagtgaaagaggaatacgagaaggtcgagaaagagtacaagaccctggaagagaggatcaaagaggacatccaggctctgaaggctctggaacagtatgagaaagagcggcaagaacagctgctgcgggacaccctgaacaccaacgagtaccggctgagcaagagaggccttagaggctggcgggaaatcatccagaaatggctgaaaatggacgagaacgagccctccgagaagtacctggaagtgttcaaggactaccagcggaagcaccctagagaggccggcgattacagcgtgtacgagttcctgtccaagaaagagaaccacttcatctggcggaatcaccctgagtacccctacctgtacgccaccttctgcgagatcgacaagaaaaagaaggacgccaagcagcaggccaccttcacactggccgatcctatcaatcaccctctgtgggtccgattcgaggaaagaagcggcagcaacctgaacaagtacagaatcctgaccgagcagctgcacaccgagaagctgaagaaaaagctgacagtgcagctggaccggctgatctaccctacagaatctggcggctgggaagagaagggcaaagtggacattgtgctgctgcccagccggcagttctacaaccagatcttcctggacatcgaggaaaagggcaagcacgccttcacctacaaggatgagagcatcaagttccctctgaagggcacactcggcggagccagagtgcagttcgacagagatcacctgagaagataccctcacaaggtggaaagcggcaacgtgggcagaatctacttcaacatgaccgtgaacatcgagcctacagagtccccagtgtccaagtctctgaagatccaccgggacgacttccccaaggtggtcaacttcaagcccaaagaactgaccgagtggatcaaggacagcaagggcaagaaactgaagtccggcatcgagtccctggaaatcggcctgagagtgatgagcatcgacctgggacagagacaggccgctgccgcctctattttcgaggtggtggatcagaagcccgacatcgaaggcaagctgtttttcccaatcaagggcaccgagctgtatgccgtgcacagagccagcttcaacatcaagctgcccggcgagacactggtcaagagcagagaagtgctgcggaaggccagagaggacaatctgaaactgatgaaccagaagctcaacttcctgcggaacgtgctgcacttccagcagttcgaggacatcaccgagagagagaagcgggtcaccaagtggatcagcagacaagagaacagcgacgtgcccctggtgtaccaggatgagctgatccagatccgcgagctgatgtacaagccttacaaggactgggtcgccttcctgaagcagctccacaagagactggaagtcgagatcggcaaagaagtgaagcactggcggaagtccctgagcgacggaagaaagggcctgtacggcatctccctgaagaacatcgacgagatcgatcggacccggaagttcctgctgagatggtccctgaggcctaccgaacctggcgaagtgcgtagactggaacccggccagagattcgccatcgaccagctgaatcacctgaacgccctgaaagaagatcggctgaagaagatggccaacaccatcatcatgcacgccctgggctactgctacgacgtgcggaagaagaaatggcaggctaagaaccccgcctgccagatcatcctgttcgaggatctgagcaactacaacccctacgaggaaaggtcccgcttcgagaacagcaagctcatgaagtggtccagacgcgagatccccagacaggttgcactgcagggcgagatctatggcctgcaagtgggagaagtgggcgctcagttcagcagcagattccacgccaagacaggcagccctggcatcagatgtagcgtcgtgaccaaagagaagctgcaggacaatcggttcttcaagaatctgcagagagagggcagactgaccctggacaaaatcgccgtgctgaaagagggcgatctgtacccagacaaaggcggcgagaagttcatcagcctgagcaaggatcggaagtgcgtgaccacacacgccgacatcaacgccgctcagaacctgcagaagcggttctggacaagaacccacggcttctacaaggtgtactgcaaggcctaccaggtggacggccagaccgtgtacatccctgagagcaaggaccagaagcagaagatcatcgaagagttcggcgagggctacttcattctgaaggacggggtgtacgaatgggtcaacgccggcaagctgaaaatcaagaagggcagctccaagcagagcagcagcgagctggtggatagcgacatcctgaaagacagcttcgacctggcctccgagctgaaaggcgaaaagctgatgctgtacagggaccccagcggcaatgtgttccccagcgacaaatggatggccgctggcgtgttcttcggaaagctggaacgcatcctgatcagcaagctgaccaaccagtactccatcagcaccatcgaggacgacagcagcaagcagtctatgaaaaggccggcggccacgaaaaaggccggccaggcaaaaaagaaaaag

SEQ ID NO: 264 - protein, 1112 aa, Artificial Sequence
  Description of Artificial Sequence: Synthetic polypeptide
MAIRSIKLKMKTNSGTDSIYLRKALWRTHQLINEGIAYYMNLLTLYRQEAIGDKTKEAYQAELINIIRNQQRNNGSSEEHGSDQEILALLRQLYELIIPSSIGESGDANQLGNKFLYPLVDPNSQSGKGTSNAGRKPRWKRLKEEGNPDWELEKKKDEERKAKDPTVKIFDNLNKYGLLPLFPLFTNIQKDIEWLPLGKRQSVRKWDKDMFIQAIERLLSWESWNRRVADEYKQLKEKTESYYKEHLTGGEEWIEKIRKFEKERNMELEKNAFAPNDGYFITSRQIRGWDRVYEKWSKLPESASPEELWKVVAEQQNKMSEGFGDPKVFSFLANRENRDIWRGHSERIYHIAAYNGLQKKLSRTKEQATFTLPDAIEHPLWIRYESPGGTNLNLFKLEEKQKKNYYVTLSKIIWPSEEKWIEKENIEIPLAPSIQFNRQIKLKQHVKGKQEISFSDYSSRISLDGVLGGSRIQFNRKYIKNHKELLGEGDIGPVFFNLVVDVAPLQETRNGRLQSPIGKALKVISSDFSKVIDYKPKELMDWMNTGSASNSFGVASLLEGMRVMSIDMGQRTSASVSIFEVVKELPKDQEQKLFYSINDTELFAIHKRSFLLNLPGEVVTKNNKQQRQERRKKRQFVRSQIRMLANVLRLETKKTPDERKKAIHKLMEIVQSYDSWTASQKEVWEKELNLLTNMAAFNDEIWKESLVELHHRIEPYVGQIVSKWRKGLSEGRKNLAGISMWNIDELEDTRRLLISWSKRSRTPGEANRIETDEPFGSSLLQHIQNVKDDRLKQMANLIIMTALGFKYDKEEKDRYKRWKETYPACQIILFENLNRYLFNLDRSRRENSRLMKWAHRSIPRTVSMQGEMFGLQVGDVRSEYSSRFHAKTGAPGIRCHALTEEDLKAGSNTLKRLIEDGFINESELAYLKKGDIIPSQGGELFVTLSKRYKKDSDNNELTVIHADINAAQNLQKRFWQQNSEVYRVPCQLARMGEDKLYIPKSQTETIKKYFGKGSFVKNNTEQEVYKWEKSEKMKIKTDTTFDLQDLDGFEDISKTIELAQEQQKKYLTMFRDPSGYFFNNETWRPQKEYWSIVNNIIKSCLKKKILSNKVEL

SEQ ID NO: 265 - protein, 1108 aa, Artificial Sequence
  Description of Artificial Sequence: Synthetic polypeptide
MATRSFILKIEPNEEVKKGLWKTHEVLNHGIAYYMNILKLIRQEAIYEHHEQDPKNPKKVSKAEIQAELWDFVLKMQKCNSFTHEVDKDVVFNILRELYEELVPSSVEKKGEANQLSNKFLYPLVDPNSQSGKGTASSGRKPRWYNLKIAGDPSWEEEKKKWEEDKKKDPLAKILGKLAEYGLIPLFIPFTDSNEPIVKEIKWMEKSRNQSVRRLDKDMFIQALERFLSWESWNLKVKEEYEKVEKEHKTLEERIKEDIQAFKSLEQYEKERQEQLLRDTLNTNEYRLSKRGLRGWREIIQKWLKMDENEPSEKYLEVFKDYQRKHPREAGDYSVYEFLSKKENHFIWRNHPEYPYLYATFCEIDKKKKDAKQQATFTLADPINHPLWVRFEERSGSNLNKYRILTEQLHTEKLKKKLTVQLDRLIYPTESGGWEEKGKVDIVLLPSRQFYNQIFLDIEEKGKHAFTYKDESIKFPLKGTLGGARVQFDRDHLRRYPHKVESGNVGRIYFNMTVNIEPTESPVSKSLKIHRDDFPKFVNFKPKELTEWIKDSKGKKLKSGIESLEIGLRVMSIDLGQRQAAAASIFEVVDQKPDIEGKLFFPIKGTELYAVHRASFNIKLPGETLVKSREVLRKAREDNLKLMNQKLNFLRNVLHFQQFEDITEREKRVTKWISRQENSDVPLVYQDELIQIRELMYKPYKDWVAFLKQLHKRLEVEIGKEVKHWRKSLSDGRKGLYGISLKNIDEIDRTRKFLLRWSLRPTEPGEVRRLEPGQRFAIDQLNHLNALKEDRLKKMANTIIMHALGYCYDVRKKKWQAKNPACQIILFEDLSNYNPYEERSRFENSKLMKWSRREIPRQVALQGEIYGLQVGEVGAQFSSRFHAKTGSPGIRCSVVTKEKLQDNRFFKNLQREGRLTLDKIAVLKEGDLYPDKGGEKFISLSKDRKLVTTHADINAAQNLQKRFWTRTHGFYKVYCKAYQVDGQTVYIPESKDQKQKIIEEFGEGYFILKDGVYEWGNAGKLKIKKGSSKQSSSELVDSDILKDSFDLASELKGEKLMLYRDPSGNVFPSDKWMAAGVFFGKLERILISKLTNQYSISTIEDDSSKQSM

SEQ ID NO: 266 - protein, 1302 aa, Artificial Sequence
  Description of Artificial Sequence: Synthetic polypeptide
MQTKKTHLHLISAKASRKYRRTIACLSDTAKKDLERRKQSGAADPAQELSCLKTIKFKLEVPEGSKLPSFDRISQIYNALETIEKGSLSYLLFALILSGFRIFPNSSAAKTFASSSCYKNDQFASQIKEIFGEMVKNFIPSELESILKKGRRKNNKDWTEENIKRVLNSEFGRKNSEGSSALFDSFLSKFSQELFRKFDSWNEVNKKYLEAAELLDSMLASYGPFDSVCKMIGDSDSRNSLPDKSTIAFTNNAEITVDIESSVMPYMAIAALLREYRQSKSKAAPVAYVQSHLTTTNGNGLSWFFKFGLDLIRKAPVSSKQSTSDGSKSLQELFSVPDDKLDGLKFIKEACEALPEASLLCGEKGELLGYQDFRTSFAGHIDSWVANYVNRLFELIELVNQLPESIKLPSILTQKNHNLVASLGLQEAEVSHSLELFEGLVKNVRQTLKKLAGIDISSSPNEQDIKEFYAFSDVLNRLGSIRNQIENAVQTAKKDKIDLESAIEWKEWKKLKKLPKLNGLGGGVPKQQELLDKALESVKQIRHYQRIDFERVIQWAVNEHCLETVPKFLVDAEKKKINKESSTDFAAKENAVRFLLEGIGAAARGKTDSVSKAAYNWFVVNNFLAKKDLNRYFINCQGCIYKPPYSKRRSLAFALRSDNKDTIEVVWEKFETFYKEISKEIEKFNIFSQEFQTFLHLENLRMKLLLRRIQKPIPAEIAFFSLPQEYYDSLPPNVAFLALNQEITPSEYITQFNLYSSFLNGNLILLRRSRSYLRAKFSWVGNSKLIYAAKEARLWKIPNAYWKSDEWKMILDSNVLVFDKAGNVLPAPTLKKVCEREGDLRLFYPLLRQLPHDWCYRNPFVKSVGREKNVIEVNKEGEPKVASALPGSLFRLIGPAPFKSLLDDCFFNPLDKDLRECMLIVDQEISQKVEAQKVEASLESCTYSIAVPIRYHLEEPKVSNQFENVLAIDQGEAGLAYAVFSLKSIGEAETKPIAVGTIRIPSIRRLIHSVSTYRKKKQRLQNFKQNYDSTAFIMRENVTGDVCAKIVGLMKEFNAFPVLEYDVKNLESGSRQLSAVYKAVNSHFLYFKEPGRDALRKQLWYGGDSWTIDGIEIVTRERKEDGKEGVEKIVPLKVFPGRSVSARFTSKTCSCCGRNVFDWLFTEKKAKTNKKFNVNSKGELTTADGVIQLFEADRSKGPKFYARRKERTPLTKPIAKGSYSLEEIERRVRTNLRRAPKSKQSRDTSQSQYFCVYKDCALHFSGMQADENAAINIGRRFLTALRKNRRSDFPSNVKISDRLLDN

SEQ ID NO: 267 - protein, 1218 aa, Artificial Sequence
  Description of Artificial Sequence: Synthetic polypeptide
MTKHSIPLHAFRNSGADARKWKGRIALLAKRGKETMRTLQFPLEMSEPEAAAINTTPFAVAYNAIEGTGKGTLFDYWAKLHLAGFRFFPSGGAATIFRQQAVFEDASWNAAFCQQSGKDWPWLVPSKLYERFTKAPREVAKKDGSKKSIEFTQENVANESHVSLVGASITDKTPEDQKEFFLKMAGALAEKFDSWKSANEDRIVAMKVIDEFLKSEGLHLPSLENIAVKCSVETKPDNATVAWHDAPMSGVQNLAIGVFATCASRIDNIYDLNGGKLSKLIQESATTPNVTALSWLFGKGLEYFRTTDIDTIMQDFNIPASAKESIKPLVESAQAIPTMTVLGKKNYAPFRPNFGGKIDSWIANYASRLMLLNDILEQIEPGFELPQALLDNETLMSGIDMTGDELKELIEAVYAWVDAAKQGLATLLGRGGNVDDAVQTFEQFSAMMDTLNGTLNTISARYVRAVEMAGKDEARLEKLIECKFDIPKWCKSVPKLVGISGGLPKVEEEIKVMNAAFKDVRARMFVRFEEIAAYVASKGAGMDVYDALEKRELEQIKKLKSAVPERAHIQAYRAVLHRIGRAVQNCSEKTKQLFSSKVIEMGVFKNPSHLNNFIFNQKGAIYRSPFDRSRHAPYQLHADKLLKNDWLELLAEISATLMASESTEQMEDALRLERTRLQLQLSGLPDWEYPASLAKPDIEVEIQTALKMQLAKDTVTSDVLQRAFNLYSSVLSGLTFKLLRRSFSLKMRFSVADTTQLIYVPKVCDWAIPKQYLQAEGEIGIAARVVTESSPAKMVTEVEMKEPKALGHFMQQAPHDWYFDASLGGTQVAGRIVEKGKEVGKERKLVGYRMRGNSAYKTVLDKSLVGNTELSQCSMIIEIPYTQTVDADFRAQVQAGLPKVSINLPVKETITASNKDEQMLFDRFVAIDLGERGLGYAVFDAKTLELQESGHRPIKAITNLLNRTHHYEQRPNQRQKFQAKFNVNLSELRENTVGDVCHQINRICAYYNAFPVLEYMVPDRLDKQLKSVYESVTNRYIWSSTDAHKSARVQFWLGGETWEHPYLKSAKDKKPLVLSPGRGASGKGTSQTCSCCGRNPFDLIKDMKPRAKIAVVDGKAKLENSELKLFERNLESKDDMLARRHRNERAGMEQPLTPGNYTVDEIKALLRANLRRAPKNRRTKDTTVSEYHCVFSDCGKTMHADENAAVNIGGKFIADIEK

SEQ ID NO: 268 - protein, 1252 aa, Artificial Sequence
  Description of Artificial Sequence: Synthetic polypeptide
MTKLRHRQKKLTHDWAGSKKREVLGSNGKLQNPLLMPVKKGQVTEFRKAFSAYARATKGEMTDGRKNMFTHSFEPFKTKPSLHQCELADKAYQSLHSYLPGSLAHFLLSAHALGFRIFSKSGEATAFQASSKIEAYESKLASELACVDLSIQNLTISTLFNALTTSVRGKGEETSADPLIARFYTLLTGKPLSRDTQGPERDLAEVISRKIASSFGTWKEMTANPLQSLQFFEEELHALDANVSLSPAFDVLIKMNDLQGDLKNRTIVFDPDAPVFEYNAEDPADIIIKLTARYAKEAVIKNQNVGNYVKNAITTTNANGLGWLLNKGLSLLPVSTDDELLEFIGVERSHPSCHALIELIAQLEAPELFEKNVFSDTRSEVQGMIDSAVSNHIARLSSSRNSLSMDSEELERLIKSFQIHTPHCSLFIGAQSLSQQLESLPEALQSGVNSADILLGSTQYMLTNSLVEESIATYQRTLNRINYLSGVAGQINGAIKRKAIDGEKIHLPAAWSELISLPFIGQPVIDVESDLAHLKNQYQTLSNEFDTLISALQKNFDLNFNKALLNRTQHFEAMCRSTKKNALSKPEIVSYRDLLARLTSCLYRGSLVLRRAGIEVLKKHKIFESNSELREHVHERKHFVFVSPLDRKAKKLLRLTDSRPDLLHVIDEILQHDNLENKDRESLWLVRSGYLLAGLPDQLSSSFINLPIITQKGDRRLIDLIQYDQINRDAFVMLVTSAFKSNLSGLQYRANKQSFVVTRTLSPYLGSKLVYVPKDKDWLVPSQMFEGRFADILQSDYMVWKDAGRLCVIDTAKHLSNIKKSVFSSEEVLAFLRELPHRTFIQTEVRGLGVNVDGIAFNNGDIPSLKTFSNCVQVKVSRTNTSLVQTLNRWFEGGKVSPPSIQFERAYYKKDDQIHEDAAKRKIRFQMPATELVHASDDAGWTPSYLLGIDPGEYGMGLSLVSINNGEVLDSGFIHINSLINFASKKSNHQTKVVPRQQYKSPYANYLEQSKDSAAGDIAHILDRLIYKLNALPVFEALSGNSQSAADQVWTKVLSFYTWGDNDAQNSIRKQHWFGASHWDIKGMLRQPPTEKKPKPYIAFPGSQVSSYGNSQRCSCCGRNPIEQLREMAKDTSIKELKIRNSEIQLFDGTIKLFNPDPSTVIERRRHNLGPSRIPVADRTFKNISPSSLEFKELITIVSRSIRHSPEFIAKKRGIGSEYFCAYSDCNSSLNSEANAAANVAQKFQKQLFFEL

SEQ ID NO: 269 - protein, 767 aa, Artificial Sequence
  Description of Artificial Sequence: Synthetic polypeptide
MAQASSTPAVSPRPRPRYREERTLVRKLLPRPGQSKQEFRENVKKLRKAFLQFNADVSGVCQWAIQFRPRYGKPAEPTETFWKFFLEPETSLPPNDSRSPEFRRLQAFEAAAGINGAAALDDPAFTNELRDSILAVASRPKTKEAQRLFSRLKDYQPAHRMILAKVAAEWIESRYRRAHQNWERNYEEWKKEKQEWEQNHPELTPEIREAFNQIFQQLEVKEKRVRICPAARLLQNKDNCQYAGKNKHSVLCNQFNEFKKNHLQGKAIKFFYKDAEKYLRCGLQSLKPNVQGPFREDWNKYLRYMNLKEETLRGKNGGRLPHCKNLGQECEFNPHTALCKQYQQQLSSRPDLVQHDELYRKWRREYWREPRKPVFRYPSVKRHSIAKIFGENYFQADFKNSVVGLRLDSMPAGQYLEFAFAPWPRNYRPQPGETEISSVHLHFVGTRPRIGFRFRVPHKRSRFDCTQEELDELRSRTFPRKAQDQKFLEAARKRLLETFPGNAEQELRLLAVDLGTDSARAAFFIGKTFQQAFPLKIVKIEKLYEQWPNQKQAGDRRDASSKQPRPGLSRDHVGRHLQKMRAQASEIAQKRQELTGTPAPETTTDQAAKKATLQPFDLRGLTVHTARMIRDWARLNARQIIQLAEENQVDLIVLESLRGFRPPGYENLDQEKKRRVAFFAHGRIRRKVTEKAVERGMRVVTVPYLASSKVCAECRKKQKDNKQWEKNKKRGLFKCEGCGSQAQVDENAARVLGRVFWGEIELPTAIP

SEQ ID NO: 270 - protein, 870 aa, Artificial Sequence
  Description of Artificial Sequence: Synthetic polypeptide
MKVHEIPRSQLLKIKQYEGSFVEWYRDLQEDRKKFASLLFRWAAFGYAAREDDGATYISPSQALLERRLLLGDAEDVAIKFLDVLFKGGAPSSSCYSLFYEDFALRDKAKYSGAKREFIEGLATMPLDKIIERIRQDEQLSKIPAEEWLILGAEYSPEEIWEQVAPRIVNVDRSLGKQLRERLGIKCRRPHDAGYCKILMEVVARQLRSHNETYHEYLNQTHEMKTKVANNLTNEFDLVCEFAEVLEEKNYGLGWYVLWQGVKQALKEQKKPTKIQIAVDQLRQPKFAGLLTAKWRALKGAYDTWKLKKRLEKRKAFPYMPNWDNDYQIPVGLTGLGVFTLEVKRTEVVVDLKEHGKLFCSHSHYFGDLTAEKHPSRYHLKFRHKLKLRKRDSRVEPTIGPWIEAALREITIQKKPNGVFYLGLPYALSHGIDNFQIAKRFFSAAKPDKEVINGLPSEMVVGAADLNLSNIVAPVKARIGKGLEGPLHALDYGYGELIDGPKILTPDGPRCGELISLKRDIVEIKSAIKEFKACQREGLTMSEETTTWLSEVESPSDSPRCMIQSRIADTSRRLNSFKYQMNKEGYQDLAEALRLLDAMDSYNSLLESYQRMHLSPGEQSPKEAKFDTKRASFRDLLRRRVAHTIVEYFDDCDIVFFEDLDGPSDSDSRNNALVKLLSPRTLLLYIRQALEKRGIGMVEVAKDGTSQNNPISGHVGWRNKQNKSEIYFYEDKELLVMDADEVGAMNILCRGLNHSVCPYSFVTKAPEKKNDEKKEGDYGKRVKRFLKDRYGSSNVRFLVASMGFVTVTTKRPKDALVGKRLYYHGGELVTHDLHNRMKDEIKYLVEKEVLARRVSLSDSTIKSYKSFAHV

SEQ ID NO: 271 - protein, 1093 aa, Artificial Sequence
  Description of Artificial Sequence: Synthetic polypeptide
MSNKEKNASETRKAYTTKMIPRSHDRMKLLGNFMDYLMDGTPIFFELWNQFGGGIDRDIISGTANKDKISDDLLLAVNWFKVMPINSKPQGVSPSNLANLFQQYSGSEPDIQAQEYFASNFDTEKHQWKDMRVEYERLLAELQLSRSDMHHDLKLMYKEKCIGLSLSTAHYITSVMFGTGAKNNRQTKHQFYSKVIQLLEESTQINSVEQLASIILKAGDCDSYRKLRIRCSRKGATPSILKIVQDYELGTNHDDEVNVPSLIANLKEKLGRFEYECEWKCMEKIKAFLASKVGPYYLGSYSAMLENALSPIKGMTTKNCKFVLKQIDAKNDIKYENEPFGKIVEGFFDSPYFESDTNVKWVLHPHHIGESNIKTLWEDLNAIHSKYEEDIASLSEDKKEKRIKVYQGDVCQTINTYCEEVGKEAKTPLVQLLRYLYSRKDDIAVDKIIDGITFLSKKHKVEKQKINPVIQKYPSFNFGNNSKLLGKIISPKDKLKHNLKCNRNQVDNYIWIEIKVLNTKTMRWEKHHYALSSTRFLEEVYYPATSENPPDALAARFRTKTNGYEGKPALSAEQIEQIRSAPVGLRKVKKRQMRLEAARQQNLLPRYTWGKDFNINICKRGNNFEVTLATKVKKKKEKNYKVVLGYDANIVRKNTYAAIEAHANGDGVIDYNDLPVKPIESGFVTVESQVRDKSYDQLSYNGVKLLYCKPHVESRRSFLEKYRNGTMKDNRGNNIQIDFMKDFEAIADDETSLYYFNMKYCKLLQSSIRNHSSQAKEYREEIFELLRDGKLSVLKLSSLSNLSFVMFKVAKSLIGTYFGHLLKKPKNSKSDVKAPPITDEDKQKADPEMFALRLALEEKRLNKVKSKKEVIANKIVAKALELRDKYGPVLIKGENISDTTKKGKKSSTNSFLMDWLARGVANKVKEMVMMHQGLEFVEVNPNFTSHQDPFVHKNPENTFRARYSRCTPSELTEKNRKEILSFLSDKPSKRPTNAYYNEGAMAFLATYGLKKNDVLGVSLEKFKQIMANILHQRSEDQLLFPSRGGMFYLATYKLDADATSVNWNGKQFWVCNADLVAAYNVGLVDIQKDFKKK

SEQ ID NO: 272 - protein, 1054 aa, Artificial Sequence
  Description of Artificial Sequence: Synthetic polypeptide
MSSAIKSYKSVLRPNERKNQLLKSTIQCLEDGSAFFFKMLQGLFGGITPEIVRFSTEQEKQQQDIALWCAVNWFRPVSQDSLTHTIASDNLVEKFEEYYGGTASDAIKQYFSASIGESYYWNDCRQQYYDLCRELGVEVSDLTHDLEILCREKCLAVATESNQNNSIISVLFGTGEKEDRSVKLRITKKILEAISNLKEIPKNVAPIQEIILNVAKATKETFRQVYAGNLGAPSTLEKFIAKDGQKEFDLKKLQTDLKKVIRGKSKERDWCCQEELRSYVEQNTIQYDLWAWGEMFNKAHTALKIKSTRNYNFAKQRLEQFKEIQSLNNLLVVKKLNDFFDSEFFSGEETYTICVHHLGGKDLSKLYKAWEDDPADPENAIVVLCDDLKNNFKKEPIRNILRYIFTIRQECSAQDILAAAKYNQQLDRYKSQKANPSVLGNQGFTWTNAVILPEKAQRNDRPNSLDLRIWLYLKLRHPDGRWKKHHIPFYDTRFFQEIYAAGNSPVDTCQFRTPRFGYHLPKLTDQTAIRVNKKHVKAAKTEARIRLAIQQGTLPVSNLKITEISATINSKGQVRIPVKFDVGRQKGTLQIGDRFCGYDQNQTASHAYSLWEVVKEGQYHKELGCFVRFISSGDIVSITENRGNQFDQLSYEGLAYPQYADWRKKASKFVSLWQITKKNKKKEIVTVEAKEKFDAICKYQPRLYKFNKEYAYLLRDIVRGKSLVELQQIRQEIFRFIEQDCGVTRLGSLSLSTLETVKAVKGIIYSYFSTALNASKNNPISDEQRKEFDPELFALLEKLELIRTRKKKQKVERIANSLIQTCLENNIKFIRGEGDLSTTNNATKKKANSRSMDWLARGVFNKIRQLAPMHNITLFGCGSLYTSHQDPLVHRNPDKAMKCRWAAIPVKDIGDWVLRKLSQNLRAKNIGTGEYYHQGVKEFLSHYELQDLEEELLKWRSDRKSNIPCWVLQNRLAEKLGNKEAVVYIPVRGGRIYFATHKVATGAVSIVFDQKQVWVCNADHVAAANIALTVKGIGEQSSDEENPDGSRIKLQLTS

SEQ ID NO: 273 - protein, 6 aa, Artificial Sequence
  Description of Artificial Sequence: Synthetic peptide
GGSGGS

SEQ ID NO: 274 - DNA, 4092 bp, Artificial Sequence
  Description of Artificial Sequence: Synthetic polynucleotide
gccaccatggccccaaagaagaagcggaaggtcggtatccacggagtcccagcagccgccaccagatccttcatcctgaagatcgagcccaacgaggaagtgaagaaaggcctctggaaaacccacgaggtgctgaaccacggaatcgcctactacatgaatatcctgaagctgatccggcaagaggccatctacgagcaccacgagcaggaccccaagaatcccaagaaggtgtccaaggccgagatccaggccgagctgtgggatttcgtgctgaagatgcagaagtgcaacagcttcacacacgaggtggacaaggacgaggtgttcaacatcctgagagagctgtacgaggaactggtgcccagcagcgtggaaaagaagggcgaagccaaccagctgagcaacaagtttctgtaccctctggtggaccccaacagccagtctggaaagggaacagccagcagcggcagaaagcccagatggtacaacctgaagattgccggcgatcccggaggctctggaggaagctccgaagtcgagttttcccatgagtactggatgagacacgcattgactctcgcaaagagggctcgagatgaacgcgaggtgcccgtgggggcagtactcgtgctcaacaatcgcgtaatcggcgaaggttggaatagggcaatcggactccacgaccccactgcacatgcggaaatcatggcccttcgacagggagggcttgtgatgcagaattatcgactttatgatgcgacgctgtacgtcacgtttgaaccttgcgtaatgtgcgcgggagctatgattcactcccgcattggacgagttgtattcggtgttcgcaacgccaagacgggtgccgcaggttcactgatggacgtgctgcatcatccaggcatgaaccaccgggtagaaatcacagaaggcatattggcggacgaatgtgcggcgctgttgtgtcgtttttttcgcatgcccaggcgggtctttaacgcccagaaaaaagcacaatcctctactgacggctcttctggatctgaaacacctggcacaagcgagagcgccacccctgagagctctggctcctgggaagaagagaagaagaagtgggaagaagataagaaaaaggacccgctggccaagatcctgggcaagctggctgagtacggactgatccctctgttcatcccctacaccgacagcaacgagcccatcgtgaaagaaatcaagtggatggaaaagtcccggaaccagagcgtgcggcggctggataaggacatgttcattcaggccctggaacggttcctgagctgggagagctggaacctgaaagtgaaagaggaatacgagaaggtcgagaaagagtacaagaccctggaagagaggatcaaagaggacatccaggctctgaaggctctggaacagtatgagaaagagcggcaagaacagctgctgcgggacaccctgaacaccaacgagtaccggctgagcaagagaggccttagaggctggcgggaaatcatccagaaatggctgaaaatggacgagaacgagccctccgagaagtacctggaagtgttcaaggactaccagcggaagcaccctagagaggccggcgattacagcgtgtacgagttcctgtccaagaaagagaaccacttcatctggcggaatcaccctgagtacccctacctgtacgccaccttctgcgagatcgacaagaaaaagaaggacgccaagcagcaggccaccttcacactggccgatcctatcaatcaccctctgtgggtccgattcgaggaaagaagcggcagcaacctgaacaagtacagaatcctgaccgagcagctgcacaccgagaagctgaagaaaaagctgacagtgcagctggaccggctgatctaccctacagaatctggcggctgggaagagaagggcaaagtggacattgtgctgctgcccagccggcagttctacaaccagatcttcctggacatcgaggaaaagggcaagcacgccttcacctacaaggatgagagcatcaagttccctctgaagggcacactcggcggagccagagtgcagttcgacagagatcacctgagaagataccctcacaaggtggaaagcggcaacgtgggcagaatctacttcaacatgaccgtgaacatcgagcctacagagtccccagtgtccaagtctctgaagatccaccgggacgacttccccaaggtggtcaacttcaagcccaaagaactgaccgagtggatcaaggacagcaagggcaagaaactgaagtccggcatcgagtccctggaaatcggcctgagagtgatgagcatcgacctgggacagagacaggccgctgccgcctctattttcgaggtggtggatcagaagcccgacatcgaaggcaagctgtttttcccaatcaagggcaccgagctgtatgccgtgcacagagccagcttcaacatcaagctgcccggcgagacactggtcaagagcagagaagtgctgcggaaggccagagaggacaatctgaaactgatgaaccagaagctcaacttcctgcggaacgtgctgcacttccagcagttcgaggacatcaccgagagagagaagcgggtcaccaagtggatcagcagacaagagaacagcgacgtgcccctggtgtaccaggatgagctgatccagatccgcgagctgatgtacaagccttacaaggactgggtcgccttcctgaagcagctccacaagagactggaagtcgagatcggcaaagaagtgaagcactggcggaagtccctgagcgacggaagaaagggcctgtacggcatctccctgaagaacatcgacgagatcgatcggacccggaagttcctgctgagatggtccctgaggcctaccgaacctggcgaagtgcgtagactggaacccggccagagattcgccatcgaccagctgaatcacctgaacgccctgaaagaagatcggctgaagaagatggccaacaccatcatcatgcacgccctgggctactgctacgacgtgcggaagaagaaatggcaggctaagaaccccgcctgccagatcatcctgttcgaggatctgagcaactacaacccctacgaggaaaggtcccgcttcgagaacagcaagctcatgaagtggtccagacgcgagatccccagacaggttgcactgcagggcgagatctatggcctgcaagtgggagaagtgggcgctcagttcagcagcagattccacgccaagacaggcagccctggcatcagatgtagcgtcgtgaccaaagagaagctgcaggacaatcggttcttcaagaatctgcagagagagggcagactgaccctggacaaaatcgccgtgctgaaagagggcgatctgtacccagacaaaggcggcgagaagttcatcagcctgagcaaggatcggaagtgcgtgaccacacacgccgacatcaacgccgctcagaacctgcagaagcggttctggacaagaacccacggcttctacaaggtgtactgcaaggcctaccaggtggacggccagaccgtgtacatccctgagagcaaggaccagaagcagaagatcatcgaagagttcggcgagggctacttcattctgaaggacggggtgtacgaatgggtcaacgccggcaagctgaaaatcaagaagggcagctccaagcagagcagcagcgagctggtggatagcgacatcctgaaagacagcttcgacctggcctccgagctgaaaggcgaaaagctgatgctgtacagggaccccagcggcaatgtgttccccagcgacaaatggatggccgctggcgtgttcttcggaaagctggaacgcatcctgatcagcaagctgaccaaccagtactccatcagcaccatcgaggacgacagcagcaagcagtctatgaaaaggccggcggccacgaaaaaggccggccaggcaaaaaagaaaaagggatcctacccatacgatgttccagattacgcttatccctacgacgtgcctgattatgcatacccatatgatgtccccgactatgcctaa

SEQ ID NO: 275 - protein, 1361 aa, Artificial Sequence
  Description of Artificial Sequence: Synthetic polypeptide
MAPKKKRKVGIHGVPAAATRSFILKIEPNEEVKKGLWKTHEVLNHGIAYYMNILKLIRQEAIYEHHEQDPKNPKKVSKAEIQAELWDFVLKMQKCNSFTHEVDKDEVFNILRELYEELVPSSVEKKGEANQLSNKFLYPLVDPNSQSGKGTASSGRKPRWYNLKIAGDPGGSGGSSEVEFSHEYWMRHALTLAKRARDEREVPVGAVLVLNNRVIGEGWNRAIGLHDPTAHAEIMALRQGGLVMQNYRLYDATLYVTFEPCVMCAGAMIHSRIGRVVFGVRNAKTGAAGSLMDVLHHPGMNHRVEITEGILADECAALLCRFFRMPRRVFNAQKKAQSSTDGSSGSETPGTSESATPESSGSWEEEKKKWEEDKKKDPLAKILGKLAEYGLIPLFIPYTDSNEPIVKEIKWMEKSRNQSVRRLDKDMFIQALERFLSWESWNLKVKEEYEKVEKEYKTLEERIKEDIQALKALEQYEKERQEQLLRDTLNTNEYRLSKRGLRGWREIIQKWLKMDENEPSEKYLEVFKDYQRKHPREAGDYSVYEFLSKKENHFIWRNHPEYPYLYATFCEIDKKKKDAKQQATFTLADPINHPLWVRFEERSGSNLNKYRILTEQLHTEKLKKKLTVQLDRLIYPTESGGWEEKGKVDIVLLPSRQFYNQIFLDIEEKGKHAFTYKDESIKFPLKGTLGGARVQFDRDHLRRYPHKVESGNVGRIYFNMTVNIEPTESPVSKSLKIHRDDFPKVVNFKPKELTEWIKDSKGKKLKSGIESLEIGLRVMSIDLGQRQAAAASIFEVVDQKPDIEGKLFFPIKGTELYAVHRASFNIKLPGETLVKSREVLRKAREDNLKLMNQKLNFLRNVLHFQQFEDITEREKRVTKWISRQENSDVPLVYQDELIQIRELMYKPYKDWVAFLKQLHKRLEVEIGKEVKHWRKSLSDGRKGLYGISLKNIDEIDRTRKFLLRWSLRPTEPGEVRRLEPGQRFAIDQLNHLNALKEDRLKKMANTIIMHALGYCYDVRKKKWQAKNPACQIILFEDLSNYNPYEERSRFENSKLMKWSRREIPRQVALQGEIYGLQVGEVGAQFSSRFHAKTGSPGIRCSVVTKEKLQDNRFFKNLQREGRLTLDKIAVLKEGDLYPDKGGEKFISLSKDRKCVTTHADINAAQNLQKRFWTRTHGFYKVYCKAYQVDGQTVYIPESKDQKQKIIEEFGEGYFILKDGVYEWVNAGKLKIKKGSSKQSSSELVDSDILKDSFDLASELKGEKLMLYRDPSGNVFPSDKWMAAGVFFGKLERILISKLTNQYSISTIEDDSSKQSMKRPAATKKAGQAKKKKGSYPYDVPDYAYPYDVPDYAYPYDVPDYA

SEQ ID NO: 276 - DNA, 4092 bp, Artificial Sequence
  Description of Artificial Sequence: Synthetic polynucleotide
gccaccatggccccaaagaagaagcggaaggtcggtatccacggagtcccagcagccgccaccagatccttcatcctgaagatcgagcccaacgaggaagtgaagaaaggcctctggaaaacccacgaggtgctgaaccacggaatcgcctactacatgaatatcctgaagctgatccggcaagaggccatctacgagcaccacgagcaggaccccaagaatcccaagaaggtgtccaaggccgagatccaggccgagctgtgggatttcgtgctgaagatgcagaagtgcaacagcttcacacacgaggtggacaaggacgaggtgttcaacatcctgagagagctgtacgaggaactggtgcccagcagcgtggaaaagaagggcgaagccaaccagctgagcaacaagtttctgtaccctctggtggaccccaacagccagtctggaaagggaacagccagcagcggcagaaagcccagatggtacaacctgaagattgccggcgatccctcctgggaagaagagaagaagaagtgggaagaagataagaaaaaggacccgctggccaagatcctgggcaagctggctgagtacggactgatccctctgttcatcccctacaccgacagcaacgagcccatcgtgaaagaaatcaagtggatggaaaagtcccggaaccagagcgtgcggcggctggataaggacatgttcattcaggccctggaacggttcctgagctgggagagctggaacctgaaagtgaaagaggaatacgagaaggtcgagaaagagtacaagaccctggaagagaggatcaaaggaggctctggaggaagctccgaagtcgagttttcccatgagtactggatgagacacgcattgactctcgcaaagagggctcgagatgaacgcgaggtgcccgtgggggcagtactcgtgctcaacaatcgcgtaatcggcgaaggttggaatagggcaatcggactccacgaccccactgcacatgcggaaatcatggcccttcgacagggagggcttgtgatgcagaattatcgactttatgatgcgacgctgtacgtcacgtttgaaccttgcgtaatgtgcgcgggagctatgattcactcccgcattggacgagttgtattcggtgttcgcaacgccaagacgggtgccgcaggttcactgatggacgtgctgcatcatccaggcatgaaccaccgggtagaaatcacagaaggcatattggcggacgaatgtgcggcgctgttgtgtcgtttttttcgcatgcccaggcgggtctttaacgcccagaaaaaagcacaatcctctactgacggctcttctggatctgaaacacctggcacaagcgagagcgccacccctgagagctctggcgaggacatccaggctctgaaggctctggaacagtatgagaaagagcggcaagaacagctgctgcgggacaccctgaacaccaacgagtaccggctgagcaagagaggccttagaggctggcgggaaatcatccagaaatggctgaaaatggacgagaacgagccctccgagaagtacctggaagtgttcaaggactaccagcggaagcaccctagagaggccggcgattacagcgtgtacgagttcctgtccaagaaagagaaccacttcatctggcggaatcaccctgagtacccctacctgtacgccaccttctgcgagatcgacaagaaaaagaaggacgccaagcagcaggccaccttcacactggccgatcctatcaatcaccctctgtgggtccgattcgaggaaagaagcggcagcaacctgaacaagtacagaatcctgaccgagcagctgcacaccgagaagctgaagaaaaagctgacagtgcagctggaccggctgatctaccctacagaatctggcggctgggaagagaagggcaaagtggacattgtgctgctgcccagccggcagttctacaaccagatcttcctggacatcgaggaaaagggcaagcacgccttcacctacaaggatgagagcatcaagttccctctgaagggcacactcggcggagccagagtgcagttcgacagagatcacctgagaagataccctcacaaggtggaaagcggcaacgtgggcagaatctacttcaacatgaccgtgaacatcgagcctacagagtccccagtgtccaagtctctgaagatccaccgggacgacttccccaaggtggtcaacttcaagcccaaagaactgaccgagtggatcaaggacagcaagggcaagaaactgaagtccggcatcgagtccctggaaatcggcctgagagtgatgagcatcgacctgggacagagacaggccgctgccgcctctattttcgaggtggtggatcagaagcccgacatcgaaggcaagctgtttttcccaatcaagggcaccgagctgtatgccgtgcacagagccagcttcaacatcaagctgcccggcgagacactggtcaagagcagagaagtgctgcggaaggccagagaggacaatctgaaactgatgaaccagaagctcaacttcctgcggaacgtgctgcacttccagcagttcgaggacatcaccgagagagagaagcgggtcaccaagtggatcagcagacaagagaacagcgacgtgcccctggtgtaccaggatgagctgatccagatccgcgagctgatgtacaagccttacaaggactgggtcgccttcctgaagcagctccacaagagactggaagtcgagatcggcaaagaagtgaagcactggcggaagtccctgagcgacggaagaaagggcctgtacggcatctccctgaagaacatcgacgagatcgatcggacccggaagttcctgctgagatggtccctgaggcctaccgaacctggcgaagtgcgtagactggaacccggccagagattcgccatcgaccagctgaatcacctgaacgccctgaaagaagatcggctgaagaagatggccaacaccatcatcatgcacgccctgggctactgctacgacgtgcggaagaagaaatggcaggctaagaaccccgcctgccagatcatcctgttcgaggatctgagcaactacaacccctacgaggaaaggtcccgcttcgagaacagcaagctcatgaagtggtccagacgcgagatccccagacaggttgcactgcagggcgagatctatggcctgcaagtgggagaagtgggcgctcagttcagcagcagattccacgccaagacaggcagccctggcatcagatgtagcgtcgtgaccaaagagaagctgcaggacaatcggttcttcaagaatctgcagagagagggcagactgaccctggacaaaatcgccgtgctgaaagagggcgatctgtacccagacaaaggcggcgagaagttcatcagcctgagcaaggatcggaagtgcgtgaccacacacgccgacatcaacgccgctcagaacctgcagaagcggttctggacaagaacccacggcttctacaaggtgtactgcaaggcctaccaggtggacggccagaccgtgtacatccctgagagcaaggaccagaagcagaagatcatcgaagagttcggcgagggctacttcattctgaaggacggggtgtacgaatgggtcaacgccggcaagctgaaaatcaagaagggcagctccaagcagagcagcagcgagctggtggatagcgacatcctgaaagacagcttcgacctggcctccgagctgaaaggcgaaaagctgatgctgtacagggaccccagcggcaatgtgttccccagcgacaaatggatggccgctggcgtgttcttcggaaagctggaacgcatcctgatcagcaagctgaccaaccagtactccatcagcaccatcgaggacgacagcagcaagcagtctatgaaaaggccggcggccacgaaaaaggccggccaggcaaaaaagaaaaagggatcctacccatacgatgttccagattacgcttatccctacgacgtgcctgattatgcatacccatatgatgtccccgactatgcctaa

SEQ ID NO: 277 - protein, 1361 aa, Artificial Sequence
  Description of Artificial Sequence: Synthetic polypeptide
MAPKKKRKVGIHGVPAAATRSFILKIEPNEEVKKGLWKTHEVLNHGIAYYMNILKLIRQEAIYEHHEQDPKNPKKVSKAEIQAELWDFVLKMQKCNSFTHEVDKDEVFNILRELYEELVPSSVEKKGEANQLSNKFLYPLVDPNSQSGKGTASSGRKPRWYNLKIAGDPSWEEEKKKWEEDKKKDPLAKILGKLAEYGLIPLFIPYTDSNEPIVKEIKWMEKSRNQSVRRLDKDMFIQALERFLSWESWNLKVKEEYEKVEKEYKTLEERIKGGSGGSSEVEFSHEYWMRHALTLAKRARDEREVPVGAVLVLNNRVIGEGWNRAIGLHDPTAHAEIMALRQGGLVMQNYRLYDATLYVTFEPCVMCAGAMIHSRIGRVVFGVRNAKTGAAGSLMDVLHHPGMNHRVEITEGILADECAALLCRFFRMPRRVFNAQKKAQSSTDGSSGSETPGTSESATPESSGEDIQALKALEQYEKERQEQLLRDTLNTNEYRLSKRGLRGWREIIQKWLKMDENEPSEKYLEVFKDYQRKHPREAGDYSVYEFLSKKENHFIWRNHPEYPYLYATFCEIDKKKKDAKQQATFTLADPINHPLWVRFEERSGSNLNKYRILTEQLHTEKLKKKLTVQLDRLIYPTESGGWEEKGKVDIVLLPSRQFYNQIFLDIEEKGKHAFTYKDESIKFPLKGTLGGARVQFDRDHLRRYPHKVESGNVGRIYFNMTVNIEPTESPVSKSLKIHRDDFPKVVNFKPKELTEWIKDSKGKKLKSGIESLEIGLRVMSIDLGQRQAAAASIFEVVDQKPDIEGKLFFPIKGTELYAVHRASFNIKLPGETLVKSREVLRKAREDNLKLMNQKLNFLRNVLHFQQFEDITEREKRVTKWISRQENSDVPLVYQDELIQIRELMYKPYKDWVAFLKQLHKRLEVEIGKEVKHWRKSLSDGRKGLYGISLKNIDEIDRTRKFLLRWSLRPTEPGEVRRLEPGQRFAIDQLNHLNALKEDRLKKMANTIIMHALGYCYDVRKKKWQAKNPACQIILFEDLSNYNPYEERSRFENSKLMKWSRREIPRQVALQGEIYGLQVGEVGAQFSSRFHAKTGSPGIRCSVVTKEKLQDNRFFKNLQREGRLTLDKIAVLKEGDLYPDKGGEKFISLSKDRKCVTTHADINAAQNLQKRFWTRTHGFYKVYCKAYQVDGQTVYIPESKDQKQKIIEEFGEGYFILKDGVYEWVNAGKLKIKKGSSKQSSSELVDSDILKDSFDLASELKGEKLMLYRDPSGNVFPSDKWMAAGVFFGKLERILISKLTNQYSISTIEDDSSKQSMKRPAATKKAGQAKKKKGSYPYDVPDYAYPYDVPDYAYPYDVPDYA

SEQ ID NO: 278 - DNA, 4092 bp, Artificial Sequence
  Description of Artificial Sequence: Synthetic polynucleotide
gccaccatggccccaaagaagaagcggaaggtcggtatccacggagtcccagcagccgccaccagatccttcatcctgaagatcgagcccaacgaggaagtgaagaaaggcctctggaaaacccacgaggtgctgaaccacggaatcgcctactacatgaatatcctgaagctgatccggcaagaggccatctacgagcaccacgagcaggaccccaagaatcccaagaaggtgtccaaggccgagatccaggccgagctgtgggatttcgtgctgaagatgcagaagtgcaacagcttcacacacgaggtggacaaggacgaggtgttcaacatcctgagagagctgtacgaggaactggtgcccagcagcgtggaaaagaagggcgaagccaaccagctgagcaacaagtttctgtaccctctggtggaccccaacagccagtctggaaagggaacagccagcagcggcagaaagcccagatggtacaacctgaagattgccggcgatccctcctgggaagaagagaagaagaagtgggaagaagataagaaaaaggacccgctggccaagatcctgggcaagctggctgagtacggactgatccctctgttcatcccctacaccgacagcaacgagcccatcgtgaaagaaatcaagtggatggaaaagtcccggaaccagagcgtgcggcggctggataaggacatgttcattcaggccctggaacggttcctgagctgggagagctggaacctgaaagtgaaagaggaatacgagaaggtcgagaaagagtacaagaccctggaagagaggatcaaagaggacatccaggctctgaaggctctggaacagtatgagaaagagcggcaagaacagctgctgcgggacaccctgaacaccaacgagtaccggctgagcaagagaggccttagaggctggcgggaaatcatccagaaatggctgaaaatggacggaggctctggaggaagctccgaagtcgagttttcccatgagtactggatgagacacgcattgactctcgcaaagagggctcgagatgaacgcgaggtgcccgtgggggcagtactcgtgctcaacaatcgcgtaatcggcgaaggttggaatagggcaatcggactccacgaccccactgcacatgcggaaatcatggcccttcgacagggagggcttgtgatgcagaattatcgactttatgatgcgacgctgtacgtcacgtttgaaccttgcgtaatgtgcgcgggagctatgattcactcccgcattggacgagttgtattcggtgttcgcaacgccaagacgggtgccgcaggttcactgatggacgtgctgcatcatccaggcatgaaccaccgggtagaaatcacagaaggcatattggcggacgaatgtgcggcgctgttgtgtcgtttttttcgcatgcccaggcgggtctttaacgcccagaaaaaagcacaatcctctactgacggctcttctggatctgaaacacctggcacaagcgagagcgccacccctgagagctctggcgagaacgagccctccgagaagtacctggaagtgttcaaggactaccagcggaagcaccctagagaggccggcgattacagcgtgtacgagttcctgtccaagaaagagaaccacttcatctggcggaatcaccctgagtacccctacctgtacgccaccttctgcgagatcgacaagaaaaagaaggacgccaagcagcaggccaccttcacactggccgatcctatcaatcaccctctgtgggtccgattcgaggaaagaagcggcagcaacctgaacaagtacagaatcctgaccgagcagctgcacaccgagaagctgaagaaaaagctgacagtgcagctggaccggctgatctaccctacagaatctggcggctgggaagagaagggcaaagtggacattgtgctgctgcccagccggcagttctacaaccagatcttcctggacatcgaggaaaagggcaagcacgccttcacctacaaggatgagagcatcaagttccctctgaagggcacactcggcggagccagagtgcagttcgacagagatcacctgagaagataccctcacaaggtggaaagcggcaacgtgggcagaatctacttcaacatgaccgtgaacatcgagcctacagagtccccagtgtccaagtctctgaagatccaccgggacgacttccccaaggtggtcaacttcaagcccaaagaactgaccgagtggatcaaggacagcaagggcaagaaactgaagtccggcatcgagtccctggaaatcggcctgagagtgatgagcatcgacctgggacagagacaggccgctgccgcctctattttcgaggtggtggatcagaagcccgacatcgaaggcaagctgtttttcccaatcaagggcaccgagctgtatgccgtgcacagagccagcttcaacatcaagctgcccggcgagacactggtcaagagcagagaagtgctgcggaaggccagagaggacaatctgaaactgatgaaccagaagctcaacttcctgcggaacgtgctgcacttccagcagttcgaggacatcaccgagagagagaagcgggtcaccaagtggatcagcagacaagagaacagcgacgtgcccctggtgtaccaggatgagctgatccagatccgcgagctgatgtacaagccttacaaggactgggtcgccttcctgaagcagctccacaagagactggaagtcgagatcggcaaagaagtgaagcactggcggaagtccctgagcgacggaagaaagggcctgtacggcatctccctgaagaacatcgacgagatcgatcggacccggaagttcctgctgagatggtccctgaggcctaccgaacctggcgaagtgcgtagactggaacccggccagagattcgccatcgaccagctgaatcacctgaacgccctgaaagaagatcggctgaagaagatggccaacaccatcatcatgcacgccctgggctactgctacgacgtgcggaagaagaaatggcaggctaagaaccccgcctgccagatcatcctgttcgaggatctgagcaactacaacccctacgaggaaaggtcccgcttcgagaacagcaagctcatgaagtggtccagacgcgagatccccagacaggttgcactgcagggcgagatctatggcctgcaagtgggagaagtgggcgctcagttcagcagcagattccacgccaagacaggcagccctggcatcagatgtagcgtcgtgaccaaagagaagctgcaggacaatcggttcttcaagaatctgcagagagagggcagactgaccctggacaaaatcgccgtgctgaaagagggcgatctgtacccagacaaaggcggcgagaagttcatcagcctgagcaaggatcggaagtgcgtgaccacacacgccgacatcaacgccgctcagaacctgcagaagcggttctggacaagaacccacggcttctacaaggtgtactgcaaggcctaccaggtggacggccagaccgtgtacatccctgagagcaaggaccagaagcagaagatcatcgaagagttcggcgagggctacttcattctgaaggacggggtgtacgaatgggtcaacgccggcaagctgaaaatcaagaagggcagctccaagcagagcagcagcgagctggtggatagcgacatcctgaaagacagcttcgacctggcctccgagctgaaaggcgaaaagctgatgctgtacagggaccccagcggcaatgtgttccccagcgacaaatggatggccgctggcgtgttcttcggaaagctggaacgcatcctgatcagcaagctgaccaaccagtactccatcagcaccatcgaggacgacagcagcaagcagtctatgaaaaggccggcggccacgaaaaaggccggccaggcaaaaaagaaaaagggatcctacccatacgatgttccagattacgcttatccctacgacgtgcctgattatgcatacccatatgatgtccccgactatgcctaa

SEQ ID NO: 279 - protein, 1361 aa, Artificial Sequence
  Description of Artificial Sequence: Synthetic polypeptide
MAPKKKRKVGIHGVPAAATRSFILKIEPNEEVKKGLWKTHEVLNHGIAYYMNILKLIRQEAIYEHHEQDPKNPKKVSKAEIQAELWDFVLKMQKCNSFTHEVDKDEVFNILRELYEELVPSSVEKKGEANQLSNKFLYPLVDPNSQSGKGTASSGRKPRWYNLKIAGDPSWEEEKKKWEEDKKKDPLAKILGKLAEYGLIPLFIPYTDSNEPIVKEIKWMEKSRNQSVRRLDKDMFIQALERFLSWESWNLKVKEEYEKVEKEYKTLEERIKEDIQALKALEQYEKERQEQLLRDTLNTNEYRLSKRGLRGWREIIQKWLKMDGGSGGSSEVEFSHEYWMRHALTLAKRARDEREVPVGAVLVLNNRVIGEGWNRAIGLHDPTAHAEIMALRQGGLVMQNYRLYDATLYVTFEPCVMCAGAMIHSRIGRVVFGVRNAKTGAAGSLMDVLHHPGMNHRVEITEGILADECAALLCRFFRMPRRVFNAQKKAQSSTDGSSGSETPGTSESATPESSGENEPSEKYLEVFKDYQRKHPREAGDYSVYEFLSKKENHFIWRNHPEYPYLYATFCEIDKKKKDAKQQATFTLADPINHPLWVRFEERSGSNLNKYRILTEQLHTEKLKKKLTVQLDRLIYPTESGGWEEKGKVDIVLLPSRQFYNQIFLDIEEKGKHAFTYKDESIKFPLKGTLGGARVQFDRDHLRRYPHKVESGNVGRIYFNMTVNIEPTESPVSKSLKIHRDDFPKVVNFKPKELTEWIKDSKGKKLKSGIESLEIGLRVMSIDLGQRQAAAASIFEVVDQKPDIEGKLFFPIKGTELYAVHRASFNIKLPGETLVKSREVLRKAREDNLKLMNQKLNFLRNVLHFQQFEDITEREKRVTKWISRQENSDVPLVYQDELIQIRELMYKPYKDWVAFLKQLHKRLEVEIGKEVKHWRKSLSDGRKGLYGISLKNIDEIDRTRKFLLRWSLRPTEPGEVRRLEPGQRFAIDQLNHLNALKEDRLKKMANTIIMHALGYCYDVRKKKWQAKNPACQIILFEDLSNYNPYEERSRFENSKLMKWSRREIPRQVALQGEIYGLQVGEVGAQFSSRFHAKTGSPGIRCSVVTKEKLQDNRFFKNLQREGRLTLDKIAVLKEGDLYPDKGGEKFISLSKDRKCVTTHADINAAQNLQKRFWTRTHGFYKVYCKAYQVDGQTVYIPESKDQKQKIIEEFGEGYFILKDGVYEWVNAGKLKIKKGSSKQSSSELVDSDILKDSFDLASELKGEKLMLYRDPSGNVFPSDKWMAAGVFFGKLERILISKLTNQYSISTIEDDSSKQSMKRPAATKKAGQAKKKKGSYPYDVPDYAYPYDVPDYAYPYDVPDYA

SEQ ID NO: 280 - DNA, 4092 bp, Artificial Sequence
  Description of Artificial Sequence: Synthetic polynucleotide
gccaccatggccccaaagaagaagcggaaggtcggtatccacggagtcccagcagccgccaccagatccttcatcctgaagatcgagcccaacgaggaagtgaagaaaggcctctggaaaacccacgaggtgctgaaccacggaatcgcctactacatgaatatcctgaagctgatccggcaagaggccatctacgagcaccacgagcaggaccccaagaatcccaagaaggtgtccaaggccgagatccaggccgagctgtgggatttcgtgctgaagatgcagaagtgcaacagcttcacacacgaggtggacaaggacgaggtgttcaacatcctgagagagctgtacgaggaactggtgcccagcagcgtggaaaagaagggcgaagccaaccagctgagcaacaagtttctgtaccctctggtggaccccaacagccagtctggaaagggaacagccagcagcggcagaaagcccagatggtacaacctgaagattgccggcgatccctcctgggaagaagagaagaagaagtgggaagaagataagaaaaaggacccgctggccaagatcctgggcaagctggctgagtacggactgatccctctgttcatcccctacaccgacagcaacgagcccatcgtgaaagaaatcaagtggatggaaaagtcccggaaccagagcgtgcggcggctggataaggacatgttcattcaggccctggaacggttcctgagctgggagagctggaacctgaaagtgaaagaggaatacgagaaggtcgagaaagagtacaagaccctggaagagaggatcaaagaggacatccaggctctgaaggctctggaacagtatgagaaagagcggcaagaacagctgctgcgggacaccctgaacaccaacgagtaccggctgagcaagagaggccttagaggctggcgggaaatcatccagaaatggctgaaaatggacgagaacgagccctccgagaagtacctggaagtgttcaaggactaccagcggaagcaccctagagaggccggcgattacagcgtgtacgagttcctgtccaagaaagagaaccacttcatctggcggaatcaccctgagtacccctacctgtacgccaccttctgcgagatcgacaagaaaaagaaggacgccaagcagcaggccaccttcacactggccgatcctatcaatcaccctctgtgggtccgattcgaggaaagaagcggcagcaacctgaacaagtacagaatcctgaccgagcagctgcacaccgagaagctgaagaaaaagctgacagtgcagctggaccggctgatctaccctacagaatctggcggctgggaagagaagggcaaagtggacattgtgctgctgcccagccggcagttctacaaccagatcttcctggacatcgaggaaaagggcaagcacgccttcacctacaaggatgagagcatcaagttccctctgaagggcacactcggcggagccagagtgcagttcgacagagatcacctgagaagataccctcacaaggtggaaagcggcaacgtgggcagaatctacttcaacatgaccgtgaacatcgagcctacagagtccccagtgtccaagtctctgaagatccaccgggacgacttccccaaggtggtcaacttcaagcccaaagaactgaccgagtggatcaaggacagcaagggcaagaaactgaagtccggcatcgagtccctggaaatcggcctgagagtgatgagcatcgacctgggacagagacaggccgctgccgcctctattttcgaggtggtggatcagaagcccgacatcgaaggcaagctgtttttcccaatcaagggcaccgagctgtatgccgtgcacagagccagcttcaacatcaagctgcccggcgagacactggtcaagagcagagaagtgctgcggaaggccagagaggacaatctgaaactgatgaaccagaagctcaacttcctgcggaacgtgctgcacttccagcagttcgaggacatcaccgagagagagaagcgggtcaccaagtggatcagcagacaagagaacagcgacgtgcccctggtgtaccaggatgagctgatccagatccgcgagctgatgtacaagccttacaaggactgggtcgccttcctgaagcagctccacaagagactggaagtcgagatcggcaaagaagtgaagcactggcggaagtccctgagcgacggaagaaagggcctgtacggcatctccctgaagaacatcgacgagatcgatcggacccggaagttcctgctgagatggtccctgaggcctaccgaacctggcgaagtgcgtagactggaacccggccagagattcgccatcgaccagctgaatcacctgaacgccctgaaagaagatcggctgaagaagatggccaacaccatcatcatgcacgccctgggctactgctacgacgtgcggaagaagaaatggcaggctaagaaccccgcctgccagatcatcctgttcgaggatctgagcaactacaacccctacgaggaaaggtcccgcttcgagaacagcaagctcatgaagtggtccagacgcgagatccccagacaggttgcactgcagggcgagatctatggcctgcaagtgggagaagtgggcgctcagttcagcagcagattccacgccaagacaggcagccctggcatcagatgtagcgtcgtgaccaaagagaagctgcaggacaatcggttcttcaagaatctgcagagagagggcagactgaccctggacaaaatcgccgtgctgaaagagggcgatctgtacccagacaaaggcggcgagaagttcatcagcctgagcaaggatcggaagtgcgtgaccacacacgccgacatcaacgccgctcagaacctgcagaagcggttctggacaagaacccacggcttctacaaggtgtactgcaaggcctaccaggtggacggaggctctggaggaagctccgaagtcgagttttcccatgagtactggatgagacacgcattgactctcgcaaagagggctcgagatgaacgcgaggtgcccgtgggggcagtactcgtgctcaacaatcgcgtaatcggcgaaggttggaatagggcaatcggactccacgaccccactgcacatgcggaaatcatggcccttcgacagggagggcttgtgatgcagaattatcgactttatgatgcgacgctgtacgtcacgtttgaaccttgcgtaatgtgcgcgggagctatgattcactcccgcattggacgagttgtattcggtgttcgcaacgccaagacgggtgccgcaggttcactgatggacgtgctgcatcatccaggcatgaaccaccgggtagaaatcacagaaggcatattggcggacgaatgtgcggcgctgttgtgtcgtttttttcgcatgcccaggcgggtctttaacgcccagaaaaaagcacaatcctctactgacggctcttctggatctgaaacacctggcacaagcgagagcgccacccctgagagctctggcggccagaccgtgtacatccctgagagcaaggaccagaagcagaagatcatcgaagagttcggcgagggctacttcattctgaaggacggggtgtacgaatgggtcaacgccggcaagctgaaaatcaagaagggcagctccaagcagagcagcagcgagctggtggatagcgacatcctgaaagacagcttcgacctggcctccgagctgaaaggcgaaaagctgatgctgtacagggaccccagcggcaatgtgttccccagcgacaaatggatggccgctggcgtgttcttcggaaagctggaacgcatcctgatcagcaagctgaccaaccagtactccatcagcaccatcgaggacgacagcagcaagcagtctatgaaaaggccggcggccacgaaaaaggccggccaggcaaaaaagaaaaagggatcctacccatacgatgttccagattacgcttatccctacgacgtgcctgattatgcatacccatatgatgtccccgactatgcctaa

SEQ ID NO: 281 - protein, 1361 aa, Artificial Sequence
  Description of Artificial Sequence: Synthetic polypeptide
MAPKKKRKVGIHGVPAAATRSFILKIEPNEEVKKGLWKTHEVLNHGIAYYMNILKLIRQEAIYEHHEQDPKNPKKVSKAEIQAELWDFVLKMQKCNSFTHEVDKDEVFNILRELYEELVPSSVEKKGEANQLSNKFLYPLVDPNSQSGKGTASSGRKPRWYNLKIAGDPSWEEEKKKWEEDKKKDPLAKILGKLAEYGLIPLFIPYTDSNEPIVKEIKWMEKSRNQSVRRLDKDMFIQALERFLSWESWNLKVKEEYEKVEKEYKTLEERIKEDIQALKALEQYEKERQEQLLRDTLNTNEYRLSKRGLRGWREIIQKWLKMDENEPSEKYLEVFKDYQRKHPREAGDYSVYEFLSKKENHFIWRNHPEYPYLYATFCEIDKKKKDAKQQATFTLADPINHPLWVRFEERSGSNLNKYRILTEQLHTEKLKKKLTVQLDRLIYPTESGGWEEKGKVDIVLLPSRQFYNQIFLDIEEKGKHAFTYKDESIKFPLKGTLGGARVQFDRDHLRRYPHKVESGNVGRIYFNMTVNIEPTESPVSKSLKIHRDDFPKVVNFKPKELTEWIKDSKGKKLKSGIESLEIGLRVMSIDLGQRQAAAASIFEVVDQKPDIEGKLFFPIKGTELYAVHRASFNIKLPGETLVKSREVLRKAREDNLKLMNQKLNFLRNVLHFQQFEDITEREKRVTKWISRQENSDVPLVYQDELIQIRELMYKPYKDWVAFLKQLHKRLEVEIGKEVKHWRKSLSDGRKGLYGISLKNIDEIDRTRKFLLRWSLRPTEPGEVRRLEPGQRFAIDQLNHLNALKEDRLKKMANTIIMHALGYCYDVRKKKWQAKNPACQIILFEDLSNYNPYEERSRFENSKLMKWSRREIPRQVALQGEIYGLQVGEVGAQFSSRFHAKTGSPGIRCSVVTKEKLQDNRFFKNLQREGRLTLDKIAVLKEGDLYPDKGGEKFISLSKDRKCVTTHADINAAQNLQKRFWTRTHGFYKVYCKAYQVDGGSGGSSEVEFSHEYWMRHALTLAKRARDEREVPVGAVLVLNNRVIGEGWNRAIGLHDPTAHAEIMALRQGGLVMQNYRLYDATLYVTFEPCVMCAGAMIHSRIGRVVFGVRNAKTGAAGSLMDVLHHPGMNHRVEITEGILADECAALLCRFFRMPRRVFNAQKKAQSSTDGSSGSETPGTSESATPESSGGQTVYIPESKDQKQKIIEEFGEGYFILKDGVYEWVNAGKLKIKKGSSKQSSSELVDSDILKDSFDLASELKGEKLMLYRDPSGNVFPSDKWMAAGVFFGKLERILISKLTNQYSISTIEDDSSKQSMKRPAATKKAGQAKKKKGSYPYDVPDYAYPYDVPDYAYPYDVPDYA

SEQ ID NO: 282 - DNA, 4092 bp, Artificial Sequence
  Description of Artificial Sequence: Synthetic polynucleotide
gccaccatggccccaaagaagaagcggaaggtcggtatccacggagtcccagcagccgccaccagatccttcatcctgaagatcgagcccaacgaggaagtgaagaaaggcctctggaaaacccacgaggtgctgaaccacggaatcgcctactacatgaatatcctgaagctgatccggcaagaggccatctacgagcaccacgagcaggaccccaagaatcccaagaaggtgtccaaggccgagatccaggccgagctgtgggatttcgtgctgaagatgcagaagtgcaacagcttcacacacgaggtggacaaggacgaggtgttcaacatcctgagagagctgtacgaggaactggtgcccagcagcgtggaaaagaagggcgaagccaaccagctgagcaacaagtttctgtaccctctggtggaccccaacagccagtctggaaagggaacagccagcagcggcagaaagcccagatggtacaacctgaagattgccggcgatccctcctgggaagaagagaagaagaagtgggaagaagataagaaaaaggacccgctggccaagatcctgggcaagctggctgagtacggactgatccctctgttcatcccctacaccgacagcaacgagcccatcgtgaaagaaatcaagtggatggaaaagtcccggaaccagagcgtgcggcggctggataaggacatgttcattcaggccctggaacggttcctgagctgggagagctggaacctgaaagtgaaagaggaatacgagaaggtcgagaaagagtacaagaccctggaagagaggatcaaagaggacatccaggctctgaaggctctggaacagtatgagaaagagcggcaagaacagctgctgcgggacaccctgaacaccaacgagtaccggctgagcaagagaggccttagaggctggcgggaaatcatccagaaatggctgaaaatggacgagaacgagccctccgagaagtacctggaagtgttcaaggactaccagcggaagcaccctagagaggccggcgattacagcgtgtacgagttcctgtccaagaaagagaaccacttcatctggcggaatcaccctgagtacccctacctgtacgccaccttctgcgagatcgacaagaaaaagaaggacgccaagcagcaggccaccttcacactggccgatcctatcaatcaccctctgtgggtccgattcgaggaaagaagcggcagcaacctgaacaagtacagaatcctgaccgagcagctgcacaccgagaagctgaagaaaaagctgacagtgcagctggaccggctgatctaccctacagaatctggcggctgggaagagaagggcaaagtggacattgtgctgctgcccagccggcagttctacaaccagatcttcctggacatcgaggaaaagggcaagcacgccttcacctacaaggatgagagcatcaagttccctctgaagggcacactcggcggagccagagtgcagttcgacagagatcacctgagaagataccctcacaaggtggaaagcggcaacgtgggcagaatctacttcaacatgaccgtgaacatcgagcctacagagtccccagtgtccaagtctctgaagatccaccgggacgacttccccaaggtggtcaacttcaagcccaaagaactgaccgagtggatcaaggacagcaagggcaagaaactgaagtccggcatcgagtccctggaaatcggcctgagagtgatgagcatcgacctgggacagagacaggccgctgccgcctctattttcgaggtggtggatcagaagcccgacatcgaaggcaagctgtttttcccaatcaagggcaccgagctgtatgccgtgcacagagccagcttcaacatcaagctgcccggcgagacactggtcaagagcagagaagtgctgcggaaggccagagaggacaatctgaaactgatgaaccagaagctcaacttcctgcggaacgtgctgcacttccagcagttcgaggacatcaccgagagagagaagcgggtcaccaagtggatcagcagacaagagaacagcgacgtgcccctggtgtaccaggatgagctgatccagatccgcgagctgatgtacaagccttacaaggactgggtcgccttcctgaagcagctccacaagagactggaagtcgagatcggcaaagaagtgaagcactggcggaagtccctgagcgacggaagaaagggcctgtacggcatctccctgaagaacatcgacgagatcgatcggacccggaagttcctgctgagatggtccctgaggcctaccgaacctggcgaagtgcgtagactggaacccggccagagattcgccatcgaccagctgaatcacctgaacgccctgaaagaagatcggctgaagaagatggccaacaccatcatcatgcacgccctgggctactgctacgacgtgcggaagaagaaatggcaggctaagaaccccgcctgccagatcatcctgttcgaggatctgagcaactacaacccctacgaggaaaggtcccgcttcgagaacagcaagctcatgaagtggtccagacgcgagatccccagacaggttgcactgcagggcgagatctatggcctgcaagtgggagaagtgggcgctcagttcagcagcagattccacgccaagacaggcagccctggcatcagatgtagcgtcgtgaccaaagagaagctgcaggacaatcggttcttcaagaatctgcagagagagggcagactgaccctggacaaaatcgccgtgctgaaagagggcgatctgtacccagacaaaggcggcgagaagttcatcagcctgagcaaggatcggaagtgcgtgaccacacacgccgacatcaacgccgctcagaacctgcagaagcggttctggacaagaacccacggcttctacaaggtgtactgcaaggcctaccaggtggacggccagaccgtgtacatccctgagagcaaggaccagaagcagaagatcatcgaagagttcggcgagggctacttcattctgaaggacggggtgtacgaatgggtcaacgccggcaagggaggctctggaggaagctccgaagtcgagttttcccatgagtactggatgagacacgcattgactctcgcaaagagggctcgagatgaacgcgaggtgcccgtgggggcagtactcgtgctcaacaatcgcgtaatcggcgaaggttggaatagggcaatcggactccacgaccccactgcacatgcggaaatcatggcccttcgacagggagggcttgtgatgcagaattatcgactttatgatgcgacgctgtacgtcacgtttgaaccttgcgtaatgtgcgcgggagctatgattcactcccgcattggacgagttgtattcggtgttcgcaacgccaagacgggtgccgcaggttcactgatggacgtgctgcatcatccaggcatgaaccaccgggtagaaatcacagaaggcatattggcggacgaatgtgcggcgctgttgtgtcgtttttttcgcatgcccaggcgggtctttaacgcccagaaaaaagcacaatcctctactgacggctcttctggatctgaaacacctggcacaagcgagagcgccacccctgagagctctggcctgaaaatcaagaagggcagctccaagcagagcagcagcgagctggtggatagcgacatcctgaaagacagcttcgacctggcctccgagctgaaaggcgaaaagctgatgctgtacagggaccccagcggcaatgtgttccccagcgacaaatggatggccgctggcgtgttcttcggaaagctggaacgcatcctgatcagcaagctgaccaaccagtactccatcagcaccatcgaggacgacagcagcaagcagtctatgaaaaggccggcggccacgaaaaaggccggccaggcaaaaaagaaaaagggatcctacccatacgatgttccagattacgcttatccctacgacgtgcctgattatgcatacccatatgatgtccccgactatgcctaa

SEQ ID NO: 283 - protein, 1361 aa, Artificial Sequence
  Description of Artificial Sequence: Synthetic polypeptide
MAPKKKRKVGIHGVPAAATRSFILKIEPNEEVKKGLWKTHEVLNHGIAYYMNILKLIRQEAIYEHHEQDPKNPKKVSKAEIQAELWDFVLKMQKCNSFTHEVDKDEVFNILRELYEELVPSSVEKKGEANQLSNKFLYPLVDPNSQSGKGTASSGRKPRWYNLKIAGDPSWEEEKKKWEEDKKKDPLAKILGKLAEYGLIPLFIPYTDSNEPIVKEIKWMEKSRNQSVRRLDKDMFIQALERFLSWESWNLKVKEEYEKVEKEYKTLEERIKEDIQALKALEQYEKERQEQLLRDTLNTNEYRLSKRGLRGWREIIQKWLKMDENEPSEKYLEVFKDYQRKHPREAGDYSVYEFLSKKENHFIWRNHPEYPYLYATFCEIDKKKKDAKQQATFTLADPINHPLWVRFEERSGSNLNKYRILTEQLHTEKLKKKLTVQLDRLIYPTESGGWEEKGKVDIVLLPSRQFYNQIFLDIEEKGKHAFTYKDESIKFPLKGTLGGARVQFDRDHLRRYPHKVESGNVGRIYFNMTVNIEPTESPVSKSLKIHRDDFPKVVNFKPKELTEWIKDSKGKKLKSGIESLEIGLRVMSIDLGQRQAAAASIFEVVDQKPDIEGKLFFPIKGTELYAVHRASFNIKLPGETLVKSREVLRKAREDNLKLMNQKLNFLRNVLHFQQFEDITEREKRVTKWISRQENSDVPLVYQDELIQIRELMYKPYKDWVAFLKQLHKRLEVEIGKEVKHWRKSLSDGRKGLYGISLKNIDEIDRTRKFLLRWSLRPTEPGEVRRLEPGQRFAIDQLNHLNALKEDRLKKMANTIIMHALGYCYDVRKKKWQAKNPACQIILFEDLSNYNPYEERSRFENSKLMKWSRREIPRQVALQGEIYGLQVGEVGAQFSSRFHAKTGSPGIRCSVVTKEKLQDNRFFKNLQREGRLTLDKIAVLKEGDLYPDKGGEKFISLSKDRKCVTTHADINAAQNLQKRFWTRTHGFYKVYCKAYQVDGQTVYIPESKDQKQKIIEEFGEGYFILKDGVYEWVNAGKGGSGGSSEVEFSHEYWMRHALTLAKRARDEREVPVGAVLVLNNRVIGEGWNRAIGLHDPTAHAEIMALRQGGLVMQNYRLYDATLYVTFEPCVMCAGAMIHSRIGRVVFGVRNAKTGAAGSLMDVLHHPGMNHRVEITEGILADECAALLCRFFRMPRRVFNAQKKAQSSTDGSSGSETPGTSESATPESSGLKIKKGSSKQSSSELVDSDILKDSFDLASELKGEKLMLYRDPSGNVFPSDKWMAAGVFFGKLERILISKLTNQYSISTIEDDSSKQSMKRPAATKKAGQAKKKKGSYPYDVPDYAYPYDVPDYAYPYDVPDYA

SEQ ID NO: 284 - skipped

SEQ ID NO: 285 - protein, 707 aa, Artificial Sequence
  Description of Artificial Sequence: Synthetic polypeptide
MADTPTLFTQFLRHHLPGQRFRKDILKQAGRILANKGEDATIAFLRGKSEESPPDFQPPVKCPIIACSRPLTEWPIYQASVAIQGYVYGQSLAEFEASDPGCSKDGLLGWFDKTGVCTDYFSVQGLNLIFQNARKRYIGVQTKVTNRNEKRHKKLKRINAKRIAEGLPELTSDEPESALDETGHLIDPPGLNTNIYCYQQVSPKPLALSEVNQLPTAYAGYSTSGDDPIQPMVTKDRLSISKGQPGYIPEHQRALLSQKKHRRMRGYGLKARALLVIVRIQDDWAVIDLRSLLRNAYWRRIVQTKEPSTITKLLKLVTGDPVLDATRMVATFTYKPGIVQVRSAKCLKNKQGSKLFSERYLNETVSVTSIDLGSNNLVAVATYRLVNGNTPELLQRFTLPSHLVKDFERYKQAHDTLEDSIQKTAVASLPQGQQTEIRMWSMYGFREAQERVCQELGLADGSIPWNVMTATSTILTDLFLARGGDPKKCMFTSEPKKKKNSKQVLYKIRDRAWAKMYRTLLSKETREAWNKALWGLKRGSPDYARLSKRKEELARRCVNYTISTAEKRAQCGRTIVALEDLNIGFFHGRGKQEPGWVGLFTRKKENRWLMQALHKAFLELAHHRGYHVIEVNPAYTSQTCPVCRHCDPDNRDQHNREAFHCIGCGFRGNADLDVATHNIAMVAITGESLKRARGSVASKTPQPLAAE

SEQ ID NO: 286 - protein, 757 aa, Artificial Sequence
  Description of Artificial Sequence: Synthetic polypeptide
MPKPAVESEFSKVLKKHFPGERFRSSYMKRGGKILAAQGEEAVVAYLQGKSEEEPPNFQPPAKCHVVTKSRDFAEWPIMKASEAIQRYIYALSTTERAACKPGKSSESHAAWFAATGVSNHGYSHVQGLNLIFDHTLGRYDGVLKKVQLRNEKARARLESINASRADEGLPEIKAEEEEVATNETGHLLQPPGINPSFYVYQTISPQAYRPRDEIVLPPEYAGYVRDPNAPIPLGVVRNRCDIQKGCPGYIPEWQREAGTAISPKTGKAVTVPGLSPKKNKRMRRYWRSEKEKAQDALLVTVRIGTDWVVIDVRGLLRNARWRTIAPKDISLNALLDLFTGDPVIDVRRNIVTFTYTLDACGTYARKWTLKGKQTKATLDKLTATQTVALVAIDLGQTNPISAGISRVTQENGALQCEPLDRFTLPDDLLKDISAYRIAWDRNEEELRARSVEALPEAQQAEVRALDGVSKETARTQLCADFGLDPKRLPWDKMSSNTTFISEALLSNSVSRDQVFFTPAPKKGAKKKAPVEVMRKDRTWARAYKPRLSVEAQKLKNEALWALKRTSPEYLKLSRRKEELCRRSINYVIEKTRRRTQCQIVIPVIEDLNVRFFHGSGKRLPGWDNFFTAKKENRWFIQGLHKAFSDLRTHRSFYVFEVRPERTSITCPKCGHCEVGNRDGEAFQCLSCGKTCNADLDVATHNLTQVALTGKTMPKREEPRDAQGTAPARKTKKASKSKAPPAEREDQTPAQEPSQTS

SEQ ID NO: 287 - protein, 766 aa, Artificial Sequence
  Description of Artificial Sequence: Synthetic polypeptide
MEKEITELTKIRREFPNKKFSSTDMKKAGKLLKAEGPDAVRDFLNSCQEIIGDFKPPVKTNIVSISRPFEEWPVSMVGRAIQEYYFSLTKEELESVHPGTSSEDHKSFFNITGLSNYNYTSVQGLNLIFKNAKAIYDGTLVKANNKNKKLEKKFNEINHKRSLEGLPIITPDFEEPFDENGHLNNPPGINRNIYGYQGCAAKVFVPSKHKMVSLPKEYEGYNRDPNLSLAGFRNRLEIPEGEPGHVPWFQRMDIPEGQIGHVNKIQRFNFVHGKNSGKVKFSDKTGRVKRYHHSKYKDATKPYKFLEESKKVSALDSILAIITIGDDWVVFDIRGLYRNVFYRELAQKGLTAVQLLDLFTGDPVIDPKKGVVTFSYKEGVVPVFSQKIVPRFKSRDTLEKLTSQGPVALLSVDLGQNEPVAARVCSLKNINDKITLDNSCRISFLDDYKKQIKDYRDSLDELEIKIRLEAINSLETNQQVEIRDLDVFSADRAKANTVDMFDIDPNLISWDSMSDARVSTQISDLYLKNGGDESRVYFEINNKRIKRSDYNISQLVRPKLSDSTRKNLNDSIWKLKRTSEEYLKLSKRKLELSRAVVNYTIRQSKLLSGINDIVIILEDLDVKKKFNGRGIRDIGWDNFFSSRKENRWFIPAFHKAFSELSSNRGLCVIEVNPAWTSATCPDCGFCSKENRDGINFTCRKCGVSYHADIDVATLNIARVAVLGKPMSGPADRERLGDTKKPRVARSRKTMKRKDISNSTVEAMVTA

SEQ ID NO: 288 - protein, 765 aa, Artificial Sequence
  Description of Artificial Sequence: Synthetic polypeptide
MYSLEMADLKSEPSLLAKLLRDRFPGKYWLPKYWKLAEKKRLTGGEEAACEYMADKQLDSPPPNFRPPARCVILAKSRPFEDWPVHRVASKAQSFVIGLSEQGFAALRAAPPSTADARRDWLRSHGASEDDLMALEAQLLETIMGNAISLHGGVLKKIDNANVKAAKRLSGRNEARLNKGLQELPPEQEGSAYGADGLLVNPPGLNLNIYCRKSCCPKPVKNTARFVGHYPGYLRDSDSILISGTMDRLTIIEGMPGHIPAWQREQGLVKPGGRRRRLSGSESNMRQKVDPSTGPRRSTRSGTVNRSNQRTGRNGDPLLVEIRMKEDWVLLDARGLLRNLRWRESKRGLSCDHEDLSLSGLLALFSGDPVIDPVRNEVVFLYGEGIIPVRSTKPVGTRQSKKLLERQASMGPLTLISCDLGQTNLIAGRASAISLTHGSLGVRSSVRIELDPEIIKSFERLRKDADRLETEILTAAKETLSDEQRGEVNSHEKDSPQTAKASLCRELGLHPPSLPWGQMGPSTTFIADMLISHGRDDDAFLSHGEFPTLEKRKKFDKRFCLESRPLLSSETRKALNESLWEVKRTSSEYARLSQRKKEMARRAVNFVVEISRRKTGLSNVIVNIEDLNVRIFHGGGKQAPGWDGFFRPKSENRWFIQAIHKAFSDLAAHHGIPVIESDPQRTSMTCPECGHCDSKNRNGVRFLCKGCGASMDADFDAACRNLERVALTGKPMPKPSTSCERLLSATTGKVCSDHSLSHDAIEKAS

SEQ ID NO: 289 - protein, 793 aa, Artificial Sequence
  Description of Artificial Sequence: Synthetic polypeptide
MSSLPTPLELLKQKHADLFKGLQFSSKDNKMAGKVLKKDGEEAALAFLSERGVSRGELPNFRPPAKTLVVAQSRPFEEFPIYRVSEAIQLYVYSLSVKELETVPSGSSTKKEHQRFFQDSSVPDFGYTSVQGLNKIFGLARGIYLGVITRGENQLQKAKSKHEALNKKRRASGEAETEFDPTPYEYMTPERKLAKPPGVNHSIMCYVDISVDEFDFRNPDGIVLPSEYAGYCREINTAIEKGTVDRLGHLKGGPGYIPGHQRKESTTEGPKINFRKGRIRRSYTALYAKRDSRRVRQGKLALPSYRHHMMRLNSNAESAILAVIFFGKDWVVFDLRGLLRNVRWRNLFVDGSTPSTLLGMFGDPVIDPKRGVVAFCYKEQIVPVVSKSITKMVKAPELLNKLYLKSEDPLVLVAIDLGQTNPVGVGVYRVMNASLDYEVVTRFALESELLREIESYRQRTNAFEAQIRAETFDAMTSEEQEEITRVRAFSASKAKENVCHRFGMPVDAVDWATMGSNTIHIAKWVMRHGDPSLVEVLEYRKDNEIKLDKNGVPKKVKLTDKRIANLTSIRLRFSQETSKHYNDTMWELRRKHPVYQKLSKSKADFSRRVVNSIIRRVNHLVPRARIVFIIEDLKNLGKVFHGSGKRELGWDSYFEPKSENRWFIQVLHKAFSETGKHKGYYIIECWPNWTSCTCPKCSCCDSENRHGEVFRCLACGYTCNTDFGTAPDNLVKIATTGKGLPGPKKRCKGSSKGKNPKIARSSETGVSVTESGAPKVKKSSPTQTSQSSSQSAP

SEQ ID NO: 290 - protein, 441 aa, Artificial Sequence
  Description of Artificial Sequence: Synthetic polypeptide
MNKIEKEKTPLAKLMNENFAGLRFPFAIIKQAGKKLLKEGELKTIEYMTGKGSIEPLPNFKPPVKCLIVAKRRDLKYFPICKASCEIQSYVYSLNYKDFMDYFSTPMTSQKQHEEFFKKSGLNIEYQNVAGLNLIFNNVKNTYNGVILKVKNRNEKLKKKAIKNNYEFEEIKTFNDDGCLINKPGINNVIYCFQSISPKILKNITHLPKEYNDYDCSVDRNIIQKYVSRLDIPESQPGHVPEWQRKLPEFNNTNNPRRRRKWYSNGRNISKGYSVDQVNQAKIEDSLLAQIKIGEDWIILDIRGLLRDLNRRELISYKNKLTIKDVLGFFSDYPIIDIKKNLVTFCYKEGVIQVVSQKSIGNKKSKQLLEKLIENKPIALVSIDLGQTNPVSVKISKLNKINNKISIESFTYRFLNEEILKEIEKYRKDYDKLELKLINEA

SEQ ID NO: 291 - protein, 772 aa, Artificial Sequence
  Description of Artificial Sequence: Synthetic polypeptide
MSNTAVSTREHMSNKTTPPSPLSLLLRAHFPGLKFESQDYKIAGKKLRDGGPEAVISYLTGKGQAKLKDVKPPAKAFVIAQSRPFIEWDLVRVSRQIQEKIFGIPATKGRPKQDGLSETAFNEAVASLEVDGKSKLNEETRAAFYEVLGLDAPSLHAQAQNALIKSAISIREGVLKKVENRNEKNLSKTKRRKEAGEEATFVEEKAHDERGYLIHPPGVNQTIPGYQAVVIKSCPSDFIGLPSGCLAKESAEALTDYLPHDRMTIPKGQPGYVPEWQHPLLNRRKNRRRRDWYSASLNKPKATCSKRSGTPNRKNSRTDQIQSGRFKGAIPVLMRFQDEWVIIDIRGLLRNARYRKLLKEKSTIPDLLSLFTGDPSIDMRQGVCTFIYKAGQACSAKMVKTKNAPEILSELTKSGPVVLVSIDLGQTNPIAAKVSRVTQLSDGQLSHETLLRELLSNDSSDGKEIARYRVASDRLRDKLANLAVERLSPEHKSEILRAKNDTPALCKARVCAALGLNPEMIAWDKMTPYTEFLATAYLEKGGDRKVATLKPKNRPEMLRRDIKFKGTEGVRIEVSPEAAEAYREAQWDLQRTSPEYLRLSTWKQELTKRILNQLRHKAAKSSQCEVVVMAFEDLNIKMMHGNGKWADGGWDAFFIKKRENRWFMQAFHKSLTELGAHKGVPTIEVTPHRTSITCTKCGHCDKANRDGERFACQKCGFVAHADLEIATDNIERVALTGKPMPKPESERSGDAKKSVGARKAAFKPEEDAEAAE

SEQ ID NO: 292 - protein, 717 aa, Artificial Sequence
  Description of Artificial Sequence: Synthetic polypeptide
MIKPTVSQFLTPGFKLIRNHSRTAGLKLKNEGEEACKKFVRENEIPKDECPNFQGGPAIANIIAKSREFTEWEIYQSSLAIQEVIFTLPKDKLPEPILKEEWRAQWLSEHGLDTVPYKEAAGLNLIIKNAVNTYKGVQVKVDNKNKNNLAKINRKNEIAKLNGEQEISFEEIKAFDDKGYLLQKPSPNKSIYCYQSVSPKPFITSKYHNVNLPEEYIGYYRKSNEPIVSPYQFDRLRIPIGEPGYVPKWQYTFLSKKENKRRKLSKRIKNVSPILGIICIKKDWCVFDMRGLLRTNHWKKYHKPTDSINDLFDYFTGDPVIDTKANVVRFRYKMENGIVNYKPVREKKGKELLENICDQNGSCKLATVDVGQNNPVAIGLFELKKVNGELTKTLISRHPTPIDFCNKITAYRERYDKLESSIKLDAIKQLTSEQKIEVDNYNNNFTPQNTKQIVCSKLNINPNDLPWDKMISGTHFISEKAQVSNKSEIYFTSTDKGKTKDVMKSDYKWFQDYKPKLSKEVRDALSDIEWRLRRESLEFNKLSKSREQDARQLANWISSMCDVIGIENLVKKNNFFGGSGKREPGWDNFYKPKKENRWWINAIHKALTELSQNKGKRVILLPAMRTSITCPKCKYCDSKNRNGEKFNCLKCGIELNADIDVATENLATVAITAQSMPKPTCERSGDAKKPVRARKAKAPEFHDKLAPSYTVVLREAV

SEQ ID NO: 293 - protein, 793 aa, Artificial Sequence
  Description of Artificial Sequence: Synthetic polypeptide
MRSSREIGDKILMRQPAEKTAFQVFRQEVIGTQKLSGGDAKTAGRLYKQGKMEAAREWLLKGARDDVPPNFQPPAKCLVVAVSHPFEEWDISKTNHDVQAYIYAQPLQAEGHLNGLSEKWEDTSADQHKLWFEKTGVPDRGLPVQAINKIAKAAVNRAFGVVRKVENRNEKRRSRDNRIAEHNRENGLTEVVREAPEVATNADGFLLHPPGIDPSILSYASVSPVPYNSSKHSFVRLPEEYQAYNVEPDAPIPQFVVEDRFAIPPGQPGYVPEWQRLKCSTNKHRRMRQWSNQDYKPKAGRRAKPLEFQAHLTRERAKGALLVVMRIKEDWVVFDVRGLLRNVEWRKVLSEEAREKLTLKGLLDLFTGDPVIDTKRGIVTFLYKAEITKILSKRTVKTKNARDLLLRLTEPGEDGLRREVGLVAVDLGQTHPIAAAIYRIGRTSAGALESTVLHRQGLREDQKEKLKEYRKRHTALDSRLRKEAFETLSVEQQKEIVTVSGSGAQITKDKVCNYLGVDPSTLPWEKMGSYTHFISDDFLRRGGDPNIVHFDRQPKKGKVSKKSQRIKRSDSQWVGRMRPRLSQETAKARMEADWAAQNENEEYKRLARSKQELARWCVNTLLQNTRCITQCDEIVVVIEDLNVKSLHGKGAREPGWDNFFTPKTENRWFIQILHKTFSELPKHRGEHVIEGCPLRTSITCPACSYCDKNSRNGEKFVCVACGATFHADFEVATYNLVRLATTGMPMPKSLERQGGGEKAGGARKARKKAKQVEKIVVQANANVTMNGASLHSP

SEQ ID NO: 294 - protein, 812 aa, Artificial Sequence
  Description of Artificial Sequence: Synthetic polypeptide
MDMLDTETNYATETPAQQQDYSPKPPKKAQRAPKGFSKKARPEKKPPKPITLFTQKHFSGVRFLKRVIRDASKILKLSESRTITFLEQAIERDGSAPPDVTPPVHNTIMAVTRPFEEWPEVILSKALQKHCYALTKKIKIKTWPKKGPGKKCLAAWSARTKIPLIPGQVQATNGLFDRIGSIYDGVEKKVTNRNANKKLEYDEAIKEGRNPAVPEYETAYNIDGTLINKPGYNPNLYITQSRTPRLITEADRPLVEKILWQMVEKKTQSRNQARRARLEKAAHLQGLPVPKFVPEKVDRSQKIEIRIIDPLDKIEPYMPQDRMAIKASQDGHVPYWQRPFLSKRRNRRVRAGWGKQVSSIQAWLTGALLVIVRLGNEAFLADIRGALRNAQWRKLLKPDATYQSLFNLFTGDPVVNTRTNHLTMAYREGVVNIVKSRSFKGRQTREHLLTLLGQGKTVAGVSFDLGQKHAAGLLAAHFGLGEDGNPVFTPIQACFLPQRYLDSLTNYRNRYDALTLDMRRQSLLALTPAQQQEFADAQRDPGGQAKRACCLKLNLNPDEIRWDLVSGISTMISDLYIERGGDPRDVHQQVETKPKGKRKSEIRILKIRDGKWAYDFRPKIADETRKAQREQLWKLQKASSEFERLSRYKINIARAIANWALQWGRELSGCDIVIPVLEDLNVGSKFFDGKGKWLLGWDNRFTPKKENRWFIKVLHKAVAELAPHRGVPVYEVMPHRTSMTCPACHYCHPTNREGDRFECQSCHVVKNTDRDVAPYNILRVAVEGKTLDRWQAEKKPQAEPDRPMILIDNQES

SEQ ID NO: 295-1303 - skipped (1009 entries)

SEQ ID NO: 1304 - protein, 1368 aa, Artificial Sequence
  Description of Artificial Sequence: Synthetic polypeptide
MDKKYSIGLAIGTNSVGWAVITDEYKVPSKKFKVLGNTDRHSIKKNLIGALLFDSGETAEATRLKRTARRRYTRRKNRICYLQEIFSNEMAKVDDSFFHRLEESVLVEEDKKHERHPIFGNIVDEVAYHEKYPTIYHLRKKLVDSTDKADLRLIYLALAHMIKFRGHFLIEGDLNPDNSDVDKLFIQLVQTYNQLFEENPINASGVDAKAILSARLSKSRRLENLIAQLPGEKKNGLFGNLIALSLGLTPNFKSNFDLAEDAKLQLSKDTYDDDLDNLLAQIGDQYADLFLAAKNLSDAILLSDILRVNTEITKAPLSASMIKRYDEHHQDLTLLKALVRQQLPEKYKEIFFDQSKNGYAGYIDGGASQEEFYKFIKPILEKMDGTEELLVKLNREDLLRKQRTFDNGSIPHQIHLGELHAILRRQEDFYPFLKDNREKIEKILTFRIPYYVGPLARGNSRFAWMTRKSEETITPWNFEEVVDKGASAQSFIERMTNFDKNLPNEKVLPKHSLLYEYFTVYNELTKVKYVTEGMRKPAFLSGEQKKAIVDLLFKTNRKVTVKQLKEDYFKKIECFDSVEISGVEDRFNASLGTYHDLLKIIKDKDFLDNEENEDILEDIVLTLTLFEDREMIEERLKTYAHLFDDKVMKQLKRRRYTGWGRLSRKLINGIRDKQSGKTILDFLKSDGFANRNFMQLIHDDSLTFKEDIQKAQVSGQGDSLHEHIANLAGSPAIKKGILQTVKVVDELVKVMGRHKPENIVIEMARENQTTQKGQKNSRERMKRIEEGIKELGSQILKEHPVENTQLQNEKLYLYYLQNGRDMYVDQELDINRLSDYDVDHIVPQSFLKDDSIDNKVLTRSDKNRGKSDNVPSEEVVKKMKNYWRQLLNAKLITQRKFDNLTKAERGGLSELDKAGFIKRQLVETRQITKHVAQILDSRMNTKYDENDKLIREVKVITLKSKLVSDFRKDFQFYKVREINNYHHAHDAYLNAVVGTALIKKYPKLESEFVYGDYKVYDVRKMIAKSEQEIGKATAKYFFYSNIMNFFKTEITLANGEIRKRPLIETNGETGEIVWDKGRDFATVRKVLSMPQVNIVKKTEVQTGGFSKESILPKRNSDKLIARKKDWDPKKYGGFESPTVAYSVLVVAKVEKGKSKKLKSVKELLGITIMERSSFEKNPIDFLEAKGYKEVKKDLIIKLPKYSLFELENGRKRMLASAGELQKGNELALPSKYVNFLYLASHYEKLKGSPEDNEQKQLFVEQHKHYLDEIIEQISEFSKRVILADANLDKVLSAYNKHRDKPIREQAENIIHLFTLTNLGAPAAFKYFDTTIDRKQYRSTKEVLDATLIHQSITGLYETRIDLSQLGGD

SEQ ID NO: 1305 - protein, 1368 aa, Artificial Sequence
  Description of Artificial Sequence: Synthetic polypeptide
MDKKYSIGLAIGTNSVGWAVITDEYKVPSKKFKVLGNTDRHSIKKNLIGALLFDSGETAEATRLKRTARRRYTRRKNRICYLQEIFSNEMAKVDDSFFHRLEESFLVEEDKKHERHPIFGNIVDEVAYHEKYPTIYHLRKKLVDSTDKADLRLIYLALAHMIKFRGHFLIEGDLNPDNSDVDKLFIQLVQTYNQLFEENPINASGVDAKAILSARLSKSRRLENLIAQLPGEKKNGLFGNLIALSLGLTPNFKSNFDLAEDAKLQLSKDTYDDDLDNLLAQIGDQYADLFLAAKNLSDAILLSDILRVNTEITKAPLSASMIKRYDEHHQDLTLLKALVRQQLPEKYKEIFFDQSKNGYAGYIDGGASQEEFYKFIKPILEKMDGTEELLVKLNREDLLRKQRTFDNGSIPHQIHLGELHAILRRQEDFYPFLKDNREKIEKILTFRIPYYVGPLARGNSRFAWMTRKSEETITPWNFEEVVDKGASAQSFIERMTNFDKNLPNEKVLPKHSLLYEYFTVYNELTKVKYVTEGMRKPAFLSGEQKKAIVDLLFKTNRKVTVKQLKEDYFKKIECFDSVEISGVEDRFNASLGTYHDLLKIIKDKDFLDNEENEDILEDIVLTLTLFEDREMIEERLKTYAHLFDDKVMKQLKRRRYTGWGRLSRKLINGIRDKQSGKTILDFLKSDGFANRNFMQLIHDDSLTFKEDIQKAQVSGQGDSLHEHIANLAGSPAIKKGILQTVKVVDELVKVMGRHKPENIVIEMARENQTTQKGQKNSRERMKRIEEGIKELGSQILKEHPVENTQLQNEKLYLYYLQNGRDMYVDQELDINRLSDYDVDHIVPQSFLKDDSIDNKVLTRSDKNRGKSDNVPSEEVVKKMKNYWRQLLNAKLITQRKFDNLTKAERGGLSELDKAGFIKRQLVETRQITKHVAQILDSRMNTKYDENDKLIREVKVITLKSKLVSDFRKDFQFYKVREINNYHHAHDAYLNAVVGTALIKKYPKLESEFVYGDYKVYDVRKMIAKSEQEIGKATAKYFFYSNIMNFFKTEITLANGEIRKRPLIETNGETGEIVWDKGRDFATVRKVLSMPQVNIVKKTEVQTGGFSKESILPKRNSDKLIARKKDWDPKKYGGFVSPTVAYSVLVVAKVEKGKSKKLKSVKELLGITIMERSSFEKNPIDFLEAKGYKEVKKDLIIKLPKYSLFELENGRKRMLASAGELQKGNELALPSKYVNFLYLASHYEKLKGSPEDNEQKQLFVEQHKHYLDEIIEQISEFSKRVILADANLDKVLSAYNKHRDKPIREQAENIIHLFTLTNLGAPAAFKYFDTTIDRKQYRSTKEVLDATLIHQSITGLYETRIDLSQLGGD

SEQ ID NO: 1306 - protein, 1368 aa, Artificial Sequence
  Description of Artificial Sequence: Synthetic polypeptide
MDKKYSIGLAIGTNSVGWAVITDEYKVPSKKFKVLGNTDRHSIKKNLIGALLFDSGETAEATRLKRTARRRYTRRKNRICYLQEIFSNEMAKVDDSFFHRLEESFLVEEDKKHERHPIFGNIVDEVAYHEKYPTIYHLRKKLVDSTDKADLRLIYLALAHMIKFRGHFLIEGDLNPDNSDVDKLFIQLVQTYNQLFEENPINASGVDAKAILSARLSKSRRLENLIAQLPGEKKNGLFGNLIALSLGLTPNFKSNFDLAEDAKLQLSKDTYDDDLDNLLAQIGDQYADLFLAAKNLSDAILLSDILRVNTEITKAPLSASMIKRYDEHHQDLTLLKALVRQQLPEKYKEIFFDQSKNGYAGYIDGGASQEEFYKFIKPILEKMDGTEELLVKLNREDLLRKQRTFDNGSIPHQIHLGELHAILRRQEDFYPFLKDNREKIEKILTFRIPYYVGPLARGNSRFAWMTRKSEETITPWNFEEVVDKGASAQSFIERMTNFDKNLPNEKVLPKHSLLYEYFTVYNELTKVKYVTEGMRKPAFLSGEQKKAIVDLLFKTNRKVTVKQLKEDYFKKIECFDSVEISGVEDRFNASLGTYHDLLKIIKDKDFLDNEENEDILEDIVLTLTLFEDREMIEERLKTYAHLFDDKVMKQLKRRRYTGWGRLSRKLINGIRDKQSGKTILDFLKSDGFANRNFMQLIHDDSLTFKEDIQKAQVSGQGDSLHEHIANLAGSPAIKKGILQTVKVVDELVKVMGRHKPENIVIEMARENQTTQKGQKNSRERMKRIEEGIKELGSQILKEHPVENTQLQNEKLYLYYLQNGRDMYVDQELDINRLSDYDVDHIVPQSFLKDDSIDNKVLTRSDKNRGKSDNVPSEEVVKKMKNYWRQLLNAKLITQRKFDNLTKAERGGLSELDKAGFIKRQLVETRQITKHVAQILDSRMNTKYDENDKLIREVKVITLKSKLVSDFRKDFQFYKVREINNYHHAHDAYLNAVVGTALIKKYPKLESEFVYGDYKVYDVRKMIAKSEQEIGKATAKYFFYSNIMNFFKTEITLANGEIRKRPLIETNGETGEIVWDKGRDFATVRKVLSMPQVNIVKKTEVQTGGFSKESILPKRNSDKLIARKKDWDPKKYGGFVSPTVAYSVLVVAKVEKGKSKKLKSVKELLGITIMERSSFEKNPIDFLEAKGYKEVKKDLIIKLPKYSLFELENGRKRMLASARELQKGNELALPSKYVNFLYLASHYEKLKGSPEDNEQKQLFVEQHKHYLDEIIEQISEFSKRVILADANLDKVLSAYNKHRDKPIREQAENIIHLFTLTNLGAPAAFKYFDTTIDRKEYRSTKEVLDATLIHQSITGLYETRIDLSQLGGD

SEQ ID NO: 1307 - protein, 1359 aa, Artificial Sequence
  Description of Artificial Sequence: Synthetic polypeptide
MDKKYSIGLDIGTNSVGWAVITDDYKVPSKKFKVLGNTDRHSIKKNLIGALLFGSGETAEATRLKRTARRRYTRRKNRICYLQEIFSNEMAKVDDSFFHRLEESFLVEEDKKHERHPIFGNIVDEVAYHEKYPTIYHLRKKLADSTDKADLRLIYLALAHMIKFRGHFLIEGDLNPDNSDVDKLFIQLVQIYNQLFEENPINASRVDAKAILSARLSKSRRLENLIAQLPGEKRNGLFGNLIALSLGLTPNFKSNFDLAEDAKLQLSKDTYDDDLDNLLAQIGDQYADLFLAAKNLSDAILLSDILRVNSEITKAPLSASMIKRYDEHHQDLTLLKALVRQQLPEKYKEIFFDQSKNGYAGYIDGGASQEEFYKFIKPILEKMDGTEELLVKLNREDLLRKQRTFDNGSIPHQIHLGELHAILRRQEDFYPFLKDNREKIEKILTFRIPYYVGPLARGNSRFAWMTRKSEETITPWNFEEVVDKGASAQSFIERMTNFDKNLPNEKVLPKHSLLYEYFTVYNELTKVKYVTEGMRKPAFLSGEQKKAIVDLLFKTNRKVTVKQLKEDYFKKIECFDSVEISGVEDRFNASLGAYHDLLKIIKDKDFLDNEENEDILEDIVLTLTLFEDRGMIEERLKTYAHLFDDKVMKQLKRRRYTGWGRLSRKLINGIRDKQSGKTILDFLKSDGFANRNFMQLIHDDSLTFKEDIQKAQVSGQGHSLHEQIANLAGSPAIKKGILQTVKIVDELVKVMGHKPENIVIEMARENQTTQKGQKNSRERMKRIEEGIKELGSQILKEHPVENTQLQNEKLYLYYLQNGRDMYVDQELDINRLSDYDVDHIVPQSFIKDDSIDNKVLTRSDKNRGKSDNVPSEEVVKKMKNYWRQLLNAKLITQRKFDNLTKAERGGLSELDKAGFIKRQLVETRQITKHVAQILDSRMNTKYDENDKLIREVKVITLKSKLVSDFRKDFQFYKVREINNYHHAHDAYLNAVVGTALIKKYPKLESEFVYGDYKVYDVRKMIAKSEQEIGKATAKYFFYSNIMNFFKTEITLANGEIRKRPLIETNGETGEIVWDKGRDFATVRKVLSMPQVNIVKKTEIQTVGQNGGLFDDNPKSPLEVTPSKLVPLKKELNPKKYGGYQKPTTAYPVLLITDTKQLIPISVMNKKQFEQNPVKFLRDRGYQQVGKNDFIKLPKYTLVDIGDGIKRLWASSKEIHKGNQLVVSKKSQILLYHAHHLDSDLSNDYLQNHNQQFDVLFNEIISFSKKCKLGKEHIQKIENVYSNKKNSASIEELAESFIKLLGFTQLGATSPFNFLGVKLNQKQYKGKKDYILPCTEGTLIRQSITGLYETRVDLSKIGED

SEQ ID NO: 1308 - protein, 4 aa, Artificial Sequence
  Description of Artificial Sequence: Synthetic peptide
GGGS

SEQ ID NO: 1309 - protein, 5 aa, Artificial Sequence
  Description of Artificial Sequence: Synthetic peptide
EAAAK

SEQ ID NO: 1310 - protein, 20 aa, Artificial Sequence
  Description of Artificial Sequence: Synthetic peptide
GSSGSETPGTSESATPESSG

SEQ ID NO: 1311 - DNA, 18 bp, Artificial Sequence
  Description of Artificial Sequence: Synthetic oligonucleotide
ggaggctctggaggaagc

SEQ ID NO: 1312 - DNA, 60 bp, Artificial Sequence
  Description of Artificial Sequence: Synthetic oligonucleotide
ggctcttctggatctgaaacacctggcacaagcgagagcgccacccctgagagctctggc

SEQ ID NO: 1313 - protein, 17 aa, Artificial Sequence
  Description of Artificial Sequence: Synthetic peptide
MAPKKKRKVGIHGVPAA

SEQ ID NO: 1314 - DNA, 51 bp, Artificial Sequence
  Description of Artificial Sequence: Synthetic oligonucleotide
atggccccaaagaagaagcggaaggtcggtatccacggagtcccagcagcc

SEQ ID NO: 1315 - protein, 1554 aa, Artificial Sequence
  Description of Artificial Sequence: Synthetic polypeptide
MDKKYSIGLAIGTNSVGWAVITDEYKVPSKKFKVLGNTDRHSIKKNLIGALLFDSGETAEATRLKRTARRRYTRRKNRICYLQEIFSNEMAKVDDSFFHRLEESFLVEEDKKHERHPIFGNIVDEVAYHEKYPTIYHLRKKLVDSTDKADLRLIYLALAHMIKFRGHFLIEGDLNPDNSDVDKLFIQLVQTYNQLFEENPINASGVDAKAILSARLSKSRRLENLIAQLPGEKKNGLFGNLIALSLGLTPNFKSNFDLAEDAKLQLSKDTYDDDLDNLLAQIGDQYADLFLAAKNLSDAILLSDILRVNTEITKAPLSASMIKRYDEHHQDLTLLKALVRQQLPEKYKEIFFDQSKNGYAGYIDGGASQEEFYKFIKPILEKMDGTEELLVKLNREDLLRKQRTFDNGSIPHQIHLGELHAILRRQEDFYPFLKDNREKIEKILTFRIPYYVGPLARGNSRFAWMTRKSEETITPWNFEEVVDKGASAQSFIERMTNFDKNLPNEKVLPKHSLLYEYFTVYNELTKVKYVTEGMRKPAFLSGEQKKAIVDLLFKTNRKVTVKQLKEDYFKKIECFDSVEISGVEDRFNASLGTYHDLLKIIKDKDFLDNEENEDILEDIVLTLTLFEDREMIEERLKTYAHLFDDKVMKQLKRRRYTGWGRLSRKLINGIRDKQSGKTILDFLKSDGFANRNFMQLIHDDSLTFKEDIQKAQVSGQGDSLHEHIANLAGSPAIKKGILQTVKVVDELVKVMGRHKPENIVIEMARENQTTQKGQKNSRERMKRIEEGIKELGSQILKEHPVENTQLQNEKLYLYYLQNGRDMYVDQELDINRLSDYDVDHIVPQSFLKDDSIDNKVLTRSDKNRGKSDNVPSEEVVKKMKNYWRQLLNAKLITQRKFDNLTKAERGGLSELDKAGFIKRQLVETRQITKHVAQILDSRMNTKYDENDKLIREVKVITLKSKLVSDFRKDFQFYKVREINNYHHAHDAYLNAVVGTALIKKYPKLESEFVYGDYKVGSSGSETPGTSESATPESSGSEVEFSHEYWMRHALTLAKRARDEREVPVGAVLVLNNRVIGEGWNRAIGLHDPTAHAEIMALRQGGLVMQNYRLIDATLYVTFEPCVMCAGAMIHSRIGRVVFGVRNAKTGAAGSLMDVLHYPGMNHRVEITEGILADECAALLCYFFRMPRQVFNAQKKAQSSTDYDVRKMIAKSEQEIGKATAKYFFYSNIMNFFKTEITLANGEIRKRPLIETNGETGEIVWDKGRDFATVRKVLSMPQVNIVKKTEVQTGGFSKESILPKRNSDKLIARKKDWDPKKYGGFDSPTVAYSVLVVAKVEKGKSKKLKSVKELLGITIMERSSFEKNPIDFLEAKGYKEVKKDLIIKLPKYSLFELENGRKRMLASAGELQKGNELALPSKYVNFLYLASHYEKLKGSPEDNEQKQLFVEQHKHYLDEIIEQISEFSKRVILADANLDKVLSAYNKHRDKPIREQAENIIHLFTLTNLGAPAAFKYFDTTIDRKRYTSTKEVLDATLIHQSITGLYETRIDLSQLGGD

SEQ ID NO: 1316 - protein, 1554 aa, Artificial Sequence
  Description of Artificial Sequence: Synthetic polypeptide
MDKKYSIGLAIGTNSVGWAVITDEYKVPSKKFKVLGNTDRHSIKKNLIGALLFDSGETAEATRLKRTARRRYTRRKNRICYLQEIFSNEMAKVDDSFFHRLEESFLVEEDKKHERHPIFGNIVDEVAYHEKYPTIYHLRKKLVDSTDKADLRLIYLALAHMIKFRGHFLIEGDLNPDNSDVDKLFIQLVQTYNQLFEENPINASGVDAKAILSARLSKSRRLENLIAQLPGEKKNGLFGNLIALSLGLTPNFKSNFDLAEDAKLQLSKDTYDDDLDNLLAQIGDQYADLFLAAKNLSDAILLSDILRVNTEITKAPLSASMIKRYDEHHQDLTLLKALVRQQLPEKYKEIFFDQSKNGYAGYIDGGASQEEFYKFIKPILEKMDGTEELLVKLNREDLLRKQRTFDNGSIPHQIHLGELHAILRRQEDFYPFLKDNREKIEKILTFRIPYYVGPLARGNSRFAWMTRKSEETITPWNFEEVVDKGASAQSFIERMTNFDKNLPNEKVLPKHSLLYEYFTVYNELTKVKYVTEGMRKPAFLSGEQKKAIVDLLFKTNRKVTVKQLKEDYFKKIECFDSVEISGVEDRFNASLGTYHDLLKIIKDKDFLDNEENEDILEDIVLTLTLFEDREMIEERLKTYAHLFDDKVMKQLKRRRYTGWGRLSRKLINGIRDKQSGKTILDFLKSDGFANRNFMQLIHDDSLTFKEDIQKAQVSGQGDSLHEHIANLAGSPAIKKGILQTVKVVDELVKVMGRHKPENIVIEMARENQTTQKGQKNSRERMKRIEEGIKELGSQILKEHPVENTQLQNEKLYLYYLQNGRDMYVDQELDINRLSDYDVDHIVPQSFLKDDSIDNKVLTRSDKNRGKSDNVPSEEVVKKMKNYWRQLLNAKLITQRKFDNLTKAERGGLSELDKAGFIKRQLVETRQITKHVAQILDSRMNTKYDENDKLIREVKVITLKSKLVSDFRKDFQFYKVREINNYHHAHDAYLNAVVGTALIKKYPKLESEFVYGDYKVYDVRKMIGSSGSETPGTSESATPESSGSEVEFSHEYWMRHALTLAKRARDEREVPVGAVLVLNNRVIGEGWNRAIGLHDPTAHAEIMALRQGGLVMQNYRLIDATLYVTFEPCVMCAGAMIHSRIGRVVFGVRNAKTGAAGSLMDVLHYPGMNHRVEITEGILADECAALLCYFFRMPRQVFNAQKKAQSSTDAKSEQEIGKATAKYFFYSNIMNFFKTEITLANGEIRKRPLIETNGETGEIVWDKGRDFATVRKVLSMPQVNIVKKTEVQTGGFSKESILPKRNSDKLIARKKDWDPKKYGGFDSPTVAYSVLVVAKVEKGKSKKLKSVKELLGITIMERSSFEKNPIDFLEAKGYKEVKKDLIIKLPKYSLFELENGRKRMLASAGELQKGNELALPSKYVNFLYLASHYEKLKGSPEDNEQKQLFVEQHKHYLDEIIEQISEFSKRVILADANLDKVLSAYNKHRDKPIREQAENIIHLFTLTNLGAPAAFKYFDTTIDRKRYTSTKEVLDATLIHQSITGLYETRIDLSQLGGD

SEQ ID NO: 1317 - protein, 1554 aa, Artificial Sequence
  Description of Artificial Sequence: Synthetic polypeptide
MDKKYSIGLAIGTNSVGWAVITDEYKVPSKKFKVLGNTDRHSIKKNLIGALLFDSGETAEATRLKRTARRRYTRRKNRICYLQEIFSNEMAKVDDSFFHRLEESFLVEEDKKHERHPIFGNIVDEVAYHEKYPTIYHLRKKLVDSTDKADLRLIYLALAHMIKFRGHFLIEGDLNPDNSDVDKLFIQLVQTYNQLFEENPINASGVDAKAILSARLSKSRRLENLIAQLPGEKKNGLFGNLIALSLGLTPNFKSNFDLAEDAKLQLSKDTYDDDLDNLLAQIGDQYADLFLAAKNLSDAILLSDILRVNTEITKAPLSASMIKRYDEHHQDLTLLKALVRQQLPEKYKEIFFDQSKNGYAGYIDGGASQEEFYKFIKPILEKMDGTEELLVKLNREDLLRKQRTFDNGSIPHQIHLGELHAILRRQEDFYPFLKDNREKIEKILTFRIPYYVGPLARGNSRFAWMTRKSEETITPWNFEEVVDKGASAQSFIERMTNFDKNLPNEKVLPKHSLLYEYFTVYNELTKVKYVTEGMRKPAFLSGEQKKAIVDLLFKTNRKVTVKQLKEDYFKKIECFDSVEISGVEDRFNASLGTYHDLLKIIKDKDFLDNEENEDILEDIVLTLTLFEDREMIEERLKTYAHLFDDKVMKQLKRRRYTGWGRLSRKLINGIRDKQSGKTILDFLKSDGFANRNFMQLIHDDSLTFKEDIQKAQVSGQGDSLHEHIANLAGSPAIKKGILQTVKVVDELVKVMGRHKPENIVIEMARENQTTQKGQKNSRERMKRIEEGIKELGSQILKEHPVENTQLQNEKLYLYYLQNGRDMYVDQELDINRLSDYDVDHIVPQSFLKDDSIDNKVLTRSDKNRGKSDNVPSEEVVKKMKNYWRQLLNAKLITQRKFDNLTKAERGGLSELDKAGFIKRQLVETRQITKHVAQILDSRMNTKYDENDKLIREVKVITLKSKLVSDFRKDFQFYKVREINNYHHAHDAYLNAVVGTALIKKYPKLESEFVYGDYKVYDVRKMIAKSEQEIGSSGSETPGTSESATPESSGSEVEFSHEYWMRHALTLAKRARDEREVPVGAVLVLNNRVIGEGWNRAIGLHDPTAHAEIMALRQGGLVMQNYRLIDATLYVTFEPCVMCAGAMIHSRIGRVVFGVRNAKTGAAGSLMDVLHYPGMNHRVEITEGILADECAALLCYFFRMPRQVFNAQKKAQSSTDGKATAKYFFYSNIMNFFKTEITLANGEIRKRPLIETNGETGEIVWDKGRDFATVRKVLSMPQVNIVKKTEVQTGGFSKESILPKRNSDKLIARKKDWDPKKYGGFDSPTVAYSVLVVAKVEKGKSKKLKSVKELLGITIMERSSFEKNPIDFLEAKGYKEVKKDLIIKLPKYSLFELENGRKRMLASAGELQKGNELALPSKYVNFLYLASHYEKLKGSPEDNEQKQLFVEQHKHYLDEIIEQISEFSKRVILADANLDKVLSAYNKHRDKPIREQAENIIHLFTLTNLGAPAAFKYFDTTIDRKRYTSTKEVLDATLIHQSITGLYETRIDLSQLGGD

SEQ ID NO: 1318 - protein, 1554 aa, Artificial Sequence
  Description of Artificial Sequence: Synthetic polypeptide
MDKKYSIGLAIGTNSVGWAVITDEYKVPSKKFKVLGNTDRHSIKKNLIGALLFDSGETAEATRLKRTARRRYTRRKNRICYLQEIFSNEMAKVDDSFFHRLEESFLVEEDKKHERHPIFGNIVDEVAYHEKYPTIYHLRKKLVDSTDKADLRLIYLALAHMIKFRGHFLIEGDLNPDNSDVDKLFIQLVQTYNQLFEENPINASGVDAKAILSARLSKSRRLENLIAQLPGEKKNGLFGNLIALSLGLTPNFKSNFDLAEDAKLQLSKDTYDDDLDNLLAQIGDQYADLFLAAKNLSDAILLSDILRVNTEITKAPLSASMIKRYDEHHQDLTLLKALVRQQLPEKYKEIFFDQSKNGYAGYIDGGASQEEFYKFIKPILEKMDGTEELLVKLNREDLLRKQRTFDNGSIPHQIHLGELHAILRRQEDFYPFLKDNREKIEKILTFRIPYYVGPLARGNSRFAWMTRKSEETITPWNFEEVVDKGASAQSFIERMTNFDKNLPNEKVLPKHSLLYEYFTVYNELTKVKYVTEGMRKPAFLSGEQKKAIVDLLFKTNRKVTVKQLKEDYFKKIECFDSVEISGVEDRFNASLGTYHDLLKIIKDKDFLDNEENEDILEDIVLTLTLFEDREMIEERLKTYAHLFDDKVMKQLKRRRYTGWGRLSRKLINGIRDKQSGKTILDFLKSDGFANRNFMQLIHDDSLTFKEDIQKAQVSGQGDSLHEHIANLAGSPAIKKGILQTVKVVDELVKVMGRHKPENIVIEMARENQTTQKGQKNSRERMKRIEEGIKELGSQILKEHPVENTQLQNEKLYLYYLQNGRDMYVDQELDINRLSDYDVDHIVPQSFLKDDSIDNKVLTRSDKNRGKSDNVPSEEVVKKMKNYWRQLLNAKLITQRKFDNLTKAERGGLSELDKAGFIKRQLVETRQITKHVAQILDSRMNTKYDENDKLIREVKVITLKSKLVSDFRKDFQFYKVREINNYHHAHDAYLNAVVGTALIKKYPKLESEFVYGDYKVYDVRKMIAKSEQEIGKATAKYFFYSGSSGSETPGTSESATPESSGSEVEFSHEYWMRHALTLAKRARDEREVPVGAVLVLNNRVIGEGWNRAIGLHDPTAHAEIMALRQGGLVMQNYRLIDATLYVTFEPCVMCAGAMIHSRIGRVVFGVRNAKTGAAGSLMDVLHYPGMNHRVEITEGILADECAALLCYFFRMPRQVFNAQKKAQSSTDNIMNFFKTEITLANGEIRKRPLIETNGETGEIVWDKGRDFATVRKVLSMPQVNIVKKTEVQTGGFSKESILPKRNSDKLIARKKDWDPKKYGGFDSPTVAYSVLVVAKVEKGKSKKLKSVKELLGITIMERSSFEKNPIDFLEAKGYKEVKKDLIIKLPKYSLFELENGRKRMLASAGELQKGNELALPSKYVNFLYLASHYEKLKGSPEDNEQKQLFVEQHKHYLDEIIEQISEFSKRVILADANLDKVLSAYNKHRDKPIREQAENIIHLFTLTNLGAPAAFKYFDTTIDRKRYTSTKEVLDATLIHQSITGLYETRIDLSQLGGD

SEQ ID NO: 1319 - protein, 1554 aa, Artificial Sequence
  Description of Artificial Sequence: Synthetic polypeptide
MDKKYSIGLAIGTNSVGWAVITDEYKVPSKKFKVLGNTDRHSIKKNLIGALLFDSGETAEATRLKRTARRRYTRRKNRICYLQEIFSNEMAKVDDSFFHRLEESFLVEEDKKHERHPIFGNIVDEVAYHEKYPTIYHLRKKLVDSTDKADLRLIYLALAHMIKFRGHFLIEGDLNPDNSDVDKLFIQLVQTYNQLFEENPINASGVDAKAILSARLSKSRRLENLIAQLPGEKKNGLFGNLIALSLGLTPNFKSNFDLAEDAKLQLSKDTYDDDLDNLLAQIGDQYADLFLAAKNLSDAILLSDILRVNTEITKAPLSASMIKRYDEHHQDLTLLKALVRQQLPEKYKEIFFDQSKNGYAGYIDGGASQEEFYKFIKPILEKMDGTEELLVKLNREDLLRKQRTFDNGSIPHQIHLGELHAILRRQEDFYPFLKDNREKIEKILTFRIPYYVGPLARGNSRFAWMTRKSEETITPWNFEEVVDKGASAQSFIERMTNFDKNLPNEKVLPKHSLLYEYFTVYNELTKVKYVTEGMRKPAFLSGEQKKAIVDLLFKTNRKVTVKQLKEDYFKKIECFDSVEISGVEDRFNASLGTYHDLLKIIKDKDFLDNEENEDILEDIVLTLTLFEDREMIEERLKTYAHLFDDKVMKQLKRRRYTGWGRLSRKLINGIRDKQSGKTILDFLKSDGFANRNFMQLIHDDSLTFKEDIQKAQVSGQGDSLHEHIANLAGSPAIKKGILQTVKVVDELVKVMGRHKPENIVIEMARENQTTQKGQKNSRERMKRIEEGIKELGSQILKEHPVENTQLQNEKLYLYYLQNGRDMYVDQELDINRLSDYDVDHIVPQSFLKDDSIDNKVLTRSDKNRGKSDNVPSEEVVKKMKNYWRQLLNAKLITQRKFDNLTKAERGGLSELDKAGFIKRQLVETRQITKHVAQILDSRMNTKYDENDKLIREVKVITLKSKLVSDFRKDFQFYKVREINNYHHAHDAYLNAVVGTALIKKYPKLESEFVYGDYKVYDVRKMIAKSEQEIGKATAKYFFYSNIMNFFKTEITLANGEIRKRPLIETNGEGSSGSETPGTSESATPESSGSEVEFSHEYWMRHALTLAKRARDEREVPVGAVLVLNNRVIGEGWNRAIGLHDPTAHAEIMALRQGGLVMQNYRLIDATLYVTFEPCVMCAGAMIHSRIGRVVFGVRNAKTGAAGSLMDVLHYPGMNHRVEITEGILADECAALLCYFFRMPRQVFNAQKKAQSSTDTGEIVWDKGRDFATVRKVLSMPQVNIVKKTEVQTGGFSKESILPKRNSDKLIARKKDWDPKKYGGFDSPTVAYSVLVVAKVEKGKSKKLKSVKELLGITIMERSSFEKNPIDFLEAKGYKEVKKDLIIKLPKYSLFELENGRKRMLASAGELQKGNELALPSKYVNFLYLASHYEKLKGSPEDNEQKQLFVEQHKHYLDEIIEQISEFSKRVILADANLDKVLSAYNKHRDKPIREQAENIIHLFTLTNLGAPAAFKYFDTTIDRKRYTSTKEVLDATLIHQSITGLYETRIDLSQLGGD

SEQ ID NO: 1320 - protein, 1554 aa, Artificial Sequence
  Description of Artificial Sequence: Synthetic polypeptide
MDKKYSIGLAIGTNSVGWAVITDEYKVPSKKFKVLGNTDRHSIKKNLIGALLFDSGETAEATRLKRTARRRYTRRKNRICYLQEIFSNEMAKVDDSFFHRLEESFLVEEDKKHERHPIFGNIVDEVAYHEKYPTIYHLRKKLVDSTDKADLRLIYLALAHMIKFRGHFLIEGDLNPDNSDVDKLFIQLVQTYNQLFEENPINASGVDAKAILSARLSKSRRLENLIAQLPGEKKNGLFGNLIALSLGLTPNFKSNFDLAEDAKLQLSKDTYDDDLDNLLAQIGDQYADLFLAAKNLSDAILLSDILRVNTEITKAPLSASMIKRYDEHHQDLTLLKALVRQQLPEKYKEIFFDQSKNGYAGYIDGGASQEEFYKFIKPILEKMDGTEELLVKLNREDLLRKQRTFDNGSIPHQIHLGELHAILRRQEDFYPFLKDNREKIEKILTFRIPYYVGPLARGNSRFAWMTRKSEETITPWNFEEVVDKGASAQSFIERMTNFDKNLPNEKVLPKHSLLYEYFTVYNELTKVKYVTEGMRKPAFLSGEQKKAIVDLLFKTNRKVTVKQLKEDYFKKIECFDSVEISGVEDRFNASLGTYHDLLKIIKDKDFLDNEENEDILEDIVLTLTLFEDREMIEERLKTYAHLFDDKVMKQLKRRRYTGWGRLSRKLINGIRDKQSGKTILDFLKSDGFANRNFMQLIHDDSLTFKEDIQKAQVSGQGDSLHEHIANLAGSPAIKKGILQTVKVVDELVKVMGRHKPENIVIEMARENQTTQKGQKNSRERMKRIEEGIKELGSQILKEHPVENTQLQNEKLYLYYLQNGRDMYVDQELDINRLSDYDVDHIVPQSFLKDDSIDNKVLTRSDKNRGKSDNVPSEEVVKKMKNYWRQLLNAKLITQRKFDNLTKAERGGLSELDKAGFIKRQLVETRQITKHVAQILDSRMNTKYDENDKLIREVKVITLKSKLVSDFRKDFQFYKVREINNYHHAHDAYLNAVVGTALIKKYPKLESEFVYGDYKVYDVRKMIAKSEQEIGKATAKYFFYSNIMNFFKTEITLANGEIRKRPLIETNGETGEIVWDKGRDFATVRKVLSMPQVNIVKKTEVQTGGFSKESILPKRNSDKLIARKKDWDPKKYGGFDSPTVAYSVLVVAKVEKGKSKKLKSVKELLGITIMERSSFEKNPIDFLEAKGYKEVKKDLIIKLPKYSLFELENGRKRMLASAGELQKGNELALPSKYVNFLYLASHYEKLKGGSSGSETPGTSESATPESSGSEVEFSHEYWMRHALTLAKRARDEREVPVGAVLVLNNRVIGEGWNRAIGLHDPTAHAEIMALRQGGLVMQNYRLIDATLYVTFEPCVMCAGAMIHSRIGRVVFGVRNAKTGAAGSLMDVLHYPGMNHRVEITEGILADECAALLCYFFRMPRQVFNAQKKAQSSTDSPEDNEQKQLFVEQHKHYLDEIIEQISEFSKRVILADANLDKVLSAYNKHRDKPIREQAENIIHLFTLTNLGAPAAFKYFDTTIDRKRYTSTKEVLDATLIHQSITGLYETRIDLSQLGGD

SEQ ID NO: 1321 - protein, 1554 aa, Artificial Sequence
  Description of Artificial Sequence: Synthetic polypeptide
MDKKYSIGLAIGTNSVGWAVITDEYKVPSKKFKVLGNTDRHSIKKNLIGALLFDSGETAEATRLKRTARRRYTRRKNRICYLQEIFSNEMAKVDDSFFHRLEESFLVEEDKKHERHPIFGNIVDEVAYHEKYPTIYHLRKKLVDSTDKADLRLIYLALAHMIKFRGHFLIEGDLNPDNSDVDKLFIQLVQTYNQLFEENPINASGVDAKAILSARLSKSRRLENLIAQLPGEKKNGLFGNLIALSLGLTPNFKSNFDLAEDAKLQLSKDTYDDDLDNLLAQIGDQYADLFLAAKNLSDAILLSDILRVNTEITKAPLSASMIKRYDEHHQDLTLLKALVRQQLPEKYKEIFFDQSKNGYAGYIDGGASQEEFYKFIKPILEKMDGTEELLVKLNREDLLRKQRTFDNGSIPHQIHLGELHAILRRQEDFYPFLKDNREKIEKILTFRIPYYVGPLARGNSRFAWMTRKSEETITPWNFEEVVDKGASAQSFIERMTNFDKNLPNEKVLPKHSLLYEYFTVYNELTKVKYVTEGMRKPAFLSGEQKKAIVDLLFKTNRKVTVKQLKEDYFKKIECFDSVEISGVEDRFNASLGTYHDLLKIIKDKDFLDNEENEDILEDIVLTLTLFEDREMIEERLKTYAHLFDDKVMKQLKRRRYTGWGRLSRKLINGIRDKQSGKTILDFLKSDGFANRNFMQLIHDDSLTFKEDIQKAQVSGQGDSLHEHIANLAGSPAIKKGILQTVKVVDELVKVMGRHKPENIVIEMARENQTTQKGQKNSRERMKRIEEGIKELGSQILKEHPVENTQLQNEKLYLYYLQNGRDMYVDQELDINRLSDYDVDHIVPQSFLKDDSIDNKVLTRSDKNRGKSDNVPSEEVVKKMKNYWRQLLNAKLITQRKFDNLTKAERGGLSELDKAGFIKRQLVETRQITKHVAQILDSRMNTKYDENDKLIREVKVITLKSKLVSDFRKDFQFYKVREINNYHHAHDAYLNAVVGTALIKKYPKLESEFVYGDYKVYDVRKMIAKSEQEIGKATAKYFFYSNIMNFFKTEITLANGSSGSETPGTSESATPESSGSEVEFSHEYWMRHALTLAKRARDEREVPVGAVLVLNNRVIGEGWNRAIGLHDPTAHAEIMALRQGGLVMQNYRLIDATLYVTFEPCVMCAGAMIHSRIGRVVFGVRNAKTGAAGSLMDVLHYPGMNHRVEITEGILADECAALLCYFFRMPRQVFNAQKKAQSSTDGEIRKRPLIETNGETGEIVWDKGRDFATVRKVLSMPQVNIVKKTEVQTGGFSKESILPKRNSDKLIARKKDWDPKKYGGFDSPTVAYSVLVVAKVEKGKSKKLKSVKELLGITIMERSSFEKNPIDFLEAKGYKEVKKDLIIKLPKYSLFELENGRKRMLASAGELQKGNELALPSKYVNFLYLASHYEKLKGSPEDNEQKQLFVEQHKHYLDEIIEQISEFSKRVILADANLDKVLSAYNKHRDKPIREQAENIIHLFTLTNLGAPAAFKYFDTTIDRKRYTSTKEVLDATLIHQSITGLYETRIDLSQLGGD

SEQ ID NO: 1322 - protein, 1554 aa, Artificial Sequence
  Description of Artificial Sequence: Synthetic polypeptide
MDKKYSIGLAIGTNSVGWAVITDEYKVPSKKFKVLGNTDRHSIKKNLIGALLFDSGETAEATRLKRTARRRYTRRKNRICYLQEIFSNEMAKVDDSFFHRLEESFLVEEDKKHERHPIFGNIVDEVAYHEKYPTIYHLRKKLVDSTDKADLRLIYLALAHMIKFRGHFLIEGDLNPDNSDVDKLFIQLVQTYNQLFEENPINASGVDAKAILSARLSKSRRLENLIAQLPGEKKNGLFGNLIALSLGLTPNFKSNFDLAEDAKLQLSKDTYDDDLDNLLAQIGDQYADLFLAAKNLSDAILLSDILRVNTEITKAPLSASMIKRYDEHHQDLTLLKALVRQQLPEKYKEIFFDQSKNGYAGYIDGGASQEEFYKFIKPILEKMDGTEELLVKLNREDLLRKQRTFDNGSIPHQIHLGELHAILRRQEDFYPFLKDNREKIEKILTFRIPYYVGPLARGNSRFAWMTRKSEETITPWNFEEVVDKGASAQSFIERMTNFDKNLPNEKVLPKHSLLYEYFTVYNELTKVKYVTEGMRKPAFLSGEQKKAIVDLLFKTNRKVTVKQLKEDYFKKIECFDSVEISGVEDRFNASLGTYHDLLKIIKDKDFLDNEENEDILEDIVLTLTLFEDREMIEERLKTYAHLFDDKVMKQLKRRRYTGWGRLSRKLINGIRDKQSGKTILDFLKSDGFANRNFMQLIHDDSLTFKEDIQKAQVSGQGDSLHEHIANLAGSPAIKKGILQTVKVVDELVKVMGRHKPENIVIEMARENQTTQKGQKNSRERMKRIEEGIKELGSQILKEHPVENTQLQNEKLYLYYLQNGRDMYVDQELDINRLSDYDVDHIVPQSFLKDDSIDNKVLTRSDKNRGKSDNVPSEEVVKKMKNYWRQLLNAKLITQRKFDNLTKAERGGLSELDKAGFIKRQLVETRQITKHVAQILDSRMNTKYDENDKLIREVKVITLKSKLVSDFRKDFQFYKVREINNYHHAHDAYLNAVVGTALIKKYPKLESEFVYGDYKVYDVRKMIAKSEGSSGSETPGTSESATPESSGSEVEFSHEYWMRHALTLAKRARDEREVPVGAVLVLNNRVIGEGWNRAIGLHDPTAHAEIMALRQGGLVMQNYRLIDATLYVTFEPCVMCAGAMIHSRIGRVVFGVRNAKTGAAGSLMDVLHYPGMNHRVEITEGILADECAALLCYFFRMPRQVFNAQKKAQSSTDQEIGKATAKYFFYSNIMNFFKTEITLANGEIRKRPLIETNGETGEIVWDKGRDFATVRKVLSMPQVNIVKKTEVQTGGFSKESILPKRNSDKLIARKKDWDPKKYGGFDSPTVAYSVLVVAKVEKGKSKKLKSVKELLGITIMERSSFEKNPIDFLEAKGYKEVKKDLIIKLPKYSLFELENGRKRMLASAGELQKGNELALPSKYVNFLYLASHYEKLKGSPEDNEQKQLFVEQHKHYLDEIIEQISEFSKRVILADANLDKVLSAYNKHRDKPIREQAENIIHLFTLTNLGAPAAFKYFDTTIDRKRYTSTKEVLDATLIHQSITGLYETRIDLSQLGGD

SEQ ID NO: 1323 - protein, 1540 aa, Artificial Sequence
  Description of Artificial Sequence: Synthetic polypeptide
MDKKYSIGLAIGTNSVGWAVITDEYKVPSKKFKVLGNTDRHSIKKNLIGALLFDSGETAEATRLKRTARRRYTRRKNRICYLQEIFSNEMAKVDDSFFHRLEESFLVEEDKKHERHPIFGNIVDEVAYHEKYPTIYHLRKKLVDSTDKADLRLIYLALAHMIKFRGHFLIEGDLNPDNSDVDKLFIQLVQTYNQLFEENPINASGVDAKAILSARLSKSRRLENLIAQLPGEKKNGLFGNLIALSLGLTPNFKSNFDLAEDAKLQLSKDTYDDDLDNLLAQIGDQYADLFLAAKNLSDAILLSDILRVNTEITKAPLSASMIKRYDEHHQDLTLLKALVRQQLPEKYKEIFFDQSKNGYAGYIDGGASQEEFYKFIKPILEKMDGTEELLVKLNREDLLRKQRTFDNGSIPHQIHLGELHAILRRQEDFYPFLKDNREKIEKILTFRIPYYVGPLARGNSRFAWMTRKSEETITPWNFEEVVDKGASAQSFIERMTNFDKNLPNEKVLPKHSLLYEYFTVYNELTKVKYVTEGMRKPAFLSGEQKKAIVDLLFKTNRKVTVKQLKEDYFKKIECFDSVEISGVEDRFNASLGTYHDLLKIIKDKDFLDNEENEDILEDIVLTLTLFEDREMIEERLKTYAHLFDDKVMKQLKRRRYTGWGRLSRKLINGIRDKQSGKTILDFLKSDGFANRNFMQLIHDDSLTFKEDIQKAQVSGQGDSLHEHIANLAGSPAIKKGILQTVKVVDELVKVMGRHKPENIVIEMARENQGSSGSETPGTSESATPESSGSEVEFSHEYWMRHALTLAKRARDEREVPVGAVLVLNNRVIGEGWNRAIGLHDPTAHAEIMALRQGGLVMQNYRLIDATLYVTFEPCVMCAGAMIHSRIGRVVFGVRNAKTGAAGSLMDVLHYPGMNHRVEITEGILADECAALLCYFFRMPRTTQKGQKNSRERMKRIEEGIKELGSQILKEHPVENTQLQNEKLYLYYLQNGRDMYVDQELDINRLSDYDVDHIVPQSFLKDDSIDNKVLTRSDKNRGKSDNVPSEEVVKKMKNYWRQLLNAKLITQRKFDNLTKAERGGLSELDKAGFIKRQLVETRQITKHVAQILDSRMNTKYDENDKLIREVKVITLKSKLVSDFRKDFQFYKVREINNYHHAHDAYLNAVVGTALIKKYPKLESEFVYGDYKVYDVRKMIAKSEQEIGKATAKYFFYSNIMNFFKTEITLANGEIRKRPLIETNGETGEIVWDKGRDFATVRKVLSMPQVNIVKKTEVQTGGFSKESILPKRNSDKLIARKKDWDPKKYGGFDSPTVAYSVLVVAKVEKGKSKKLKSVKELLGITIMERSSFEKNPIDFLEAKGYKEVKKDLIIKLPKYSLFELENGRKRMLASAGELQKGNELALPSKYVNFLYLASHYEKLKGSPEDNEQKQLFVEQHKHYLDEIIEQISEFSKRVILADANLDKVLSAYNKHRDKPIREQAENIIHLFTLTNLGAPAAFKYFDTTIDRKRYTSTKEVLDATLIHQSITGLYETRIDLSQLGGD

SEQ ID NO: 1324 - protein, 1540 aa, Artificial Sequence
  Description of Artificial Sequence: Synthetic polypeptide
MDKKYSIGLAIGTNSVGWAVITDEYKVPSKKFKVLGNTDRHSIKKNLIGALLFDSGETAEATRLKRTARRRYTRRKNRICYLQEIFSNEMAKVDDSFFHRLEESFLVEEDKKHERHPIFGNIVDEVAYHEKYPTIYHLRKKLVDSTDKADLRLIYLALAHMIKFRGHFLIEGDLNPDNSDVDKLFIQLVQTYNQLFEENPINASGVDAKAILSARLSKSRRLENLIAQLPGEKKNGLFGNLIALSLGLTPNFKSNFDLAEDAKLQLSKDTYDDDLDNLLAQIGDQYADLFLAAKNLSDAILLSDILRVNTEITKAPLSASMIKRYDEHHQDLTLLKALVRQQLPEKYKEIFFDQSKNGYAGYIDGGASQEEFYKFIKPILEKMDGTEELLVKLNREDLLRKQRTFDNGSIPHQIHLGELHAILRRQEDFYPFLKDNREKIEKILTFRIPYYVGPLARGNSRFAWMTRKSEETITPWNFEEVVDKGASAQSFIERMTNFDKNLPNEKVLPKHSLLYEYFTVYNELTKVKYVTEGMRKPAFLSGEQKKAIVDLLFKTNRKVTVKQLKEDYFKKIECFDSVEISGVEDRFNASLGTYHDLLKIIKDKDFLDNEENEDILEDIVLTLTLFEDREMIEERLKTYAHLFDDKVMKQLKRRRYTGWGRLSRKLINGIRDKQSGKTILDFLKSDGFANRNFMQLIHDDSLTFKEDIQKAQVSGQGDSLHEHIANLAGSPAIKKGILQTVKVVDELVKVMGRHKPENIVIEMARENQTTQKGQKNSRERMKRIEEGIKELGSQILKEHPVENTQLQNEKLYLYYLQNGRDMYVDQELDINRLSDYDVDHIVPQSFLKDDSIDNKVLTRSDKNRGKSDNVPSEEVVKKMKNYWRQLLNAKLITQRKFDNLTKAERGGLSELDKAGFIKRQLVETRQITKHVAQILDSRMNTKYDENDKLIREVKVITLKSKLVSDFRKDFQFYKVREINNYHHAHDAYLNAVVGTALIKKYPKLESEFVYGDYKVYDVRKMIAKSEQEIGKATAKYFFYSNIMNFFKTEITLANGEIRKRPLIETNGETGEIVWDKGRDFATVRKVLSMPQVNIVKKTEVQTGGFSKESILPKRNSDKLIARKKDWDPKKYGGFDSPTVAYSVLVVAKVEKGKSKKLKSVKELLGITIMERSSFEKNPIDFLEAKGYKEVKKDLIIKLPKYSLFELENGRKRMLASAGELQKGNELALPSKYVNFLYLASHYEKLKGSPGSSGSETPGTSESATPESSGSEVEFSHEYWMRHALTLAKRARDEREVPVGAVLVLNNRVIGEGWNRAIGLHDPTAHAEIMALRQGGLVMQNYRLIDATLYVTFEPCVMCAGAMIHSRIGRVVFGVRNAKTGAAGSLMDVLHYPGMNHRVEITEGILADECAALLCYFFRMPREDNEQKQLFVEQHKHYLDEIIEQISEFSKRVILADANLDKVLSAYNKHRDKPIREQAENIIHLFTLTNLGAPAAFKYFDTTIDRKRYTSTKEVLDATLIHQSITGLYETRIDLSQLGGD

SEQ ID NO: 1325 - protein, 1543 aa, Artificial Sequence
  Description of Artificial Sequence: Synthetic polypeptide
MDKKYSIGLAIGTNSVGWAVITDEYKVPSKKFKVLGNTDRHSIKKNLIGALLFDSGETAEATRLKRTARRRYTRRKNRICYLQEIFSNEMAKVDDSFFHRLEESFLVEEDKKHERHPIFGNIVDEVAYHEKYPTIYHLRKKLVDSTDKADLRLIYLALAHMIKFRGHFLIEGDLNPDNSDVDKLFIQLVQTYNQLFEENPINASGVDAKAILSARLSKSRRLENLIAQLPGEKKNGLFGNLIALSLGLTPNFKSNFDLAEDAKLQLSKDTYDDDLDNLLAQIGDQYADLFLAAKNLSDAILLSDILRVNTEITKAPLSASMIKRYDEHHQDLTLLKALVRQQLPEKYKEIFFDQSKNGYAGYIDGGASQEEFYKFIKPILEKMDGTEELLVKLNREDLLRKQRTFDNGSIPHQIHLGELHAILRRQEDFYPFLKDNREKIEKILTFRIPYYVGPLARGNSRFAWMTRKSEETITPWNFEEVVDKGASAQSFIERMTNFDKNLPNEKVLPKHSLLYEYFTVYNELTKVKYVTEGMRKPAFLSGEQKKAIVDLLFKTNRKVTVKQLKEDYFKKIECFDSVEISGVEDRFNASLGTYHDLLKIIKDKDFLDNEENEDILEDIVLTLTLFEDREMIEERLKTYAHLFDDKVMKQLKRRRYTGWGRLSRKLINGIRDKQSGKTILDFLKSDGFANRNFMQLIHDDSLTFKEDIQKAQVSGQGDSLHEHIANLAGSPAIKKGILQTVKVVDELVKVMGRHKPENIVIEMARENQTTQKGQKNSRERMKRIEEGIKELGSQILKEHPVENTQLQNEKLYLYYLQNGRDMYVDQELDINRLSDYDVDHIVPQSFLKDDSIDNKVLTRSDKNRGKSDNVPSEEVVKKMKNYWRQLLNAKLITQRKFDNLTKAERGGLSELDKAGFIKRQLVETRQITKHVAQILDSRMNTKYDENDKLIREVKVITLKSKLVSDFRKDFQFYKVREINNYHHAHDAYLNAVVGTALIKKYPKLESEFVYGDYKVYDVRKMIAKSEQEIGKATAKYFFYSNIMNFFKTEITLANGEIRKRPLIETNGETGEIVWDKGRDFATVRKVLSMPQVNIVKKTEVQTGGFSKESILPKRNSDKLIARKKDWDPKKYGGFDSPTVAYSVLVVAKVEKGKSKKLKSVKELLGITIMERSSFEKNPIDFLEAKGYKEVKKDLIIKLPKYSLFELENGRKRMLASAGELQKGNELALPSKYVNFLYLASHYEKLKGSPGSSGSSGSETPGTSESATPESSGSEVEFSHEYWMRHALTLAKRARDEREVPVGAVLVLNNRVIGEGWNRAIGLHDPTAHAEIMALRQGGLVMQNYRLIDATLYVTFEPCVMCAGAMIHSRIGRVVFGVRNAKTGAAGSLMDVLHYPGMNHRVEITEGILADECAALLCYFFRMPREDNEQKQLFVEQHKHYLDEIIEQISEFSKRVILADANLDKVLSAYNKHRDKPIREQAENIIHLFTLTNLGAPAAFKYFDTTIDRKRYTSTKEVLDATLIHQSITGLYETRIDLSQLGGD

SEQ ID NO: 1326 - protein, 1546 aa, Artificial Sequence
  Description of Artificial Sequence: Synthetic polypeptide
MDKKYSIGLAIGTNSVGWAVITDEYKVPSKKFKVLGNTDRHSIKKNLIGALLFDSGETAEATRLKRTARRRYTRRKNRICYLQEIFSNEMAKVDDSFFHRLEESFLVEEDKKHERHPIFGNIVDEVAYHEKYPTIYHLRKKLVDSTDKADLRLIYLALAHMIKFRGHFLIEGDLNPDNSDVDKLFIQLVQTYNQLFEENPINASGVDAKAILSARLSKSRRLENLIAQLPGEKKNGLFGNLIALSLGLTPNFKSNFDLAEDAKLQLSKDTYDDDLDNLLAQIGDQYADLFLAAKNLSDAILLSDILRVNTEITKAPLSASMIKRYDEHHQDLTLLKALVRQQLPEKYKEIFFDQSKNGYAGYIDGGASQEEFYKFIKPILEKMDGTEELLVKLNREDLLRKQRTFDNGSIPHQIHLGELHAILRRQEDFYPFLKDNREKIEKILTFRIPYYVGPLARGNSRFAWMTRKSEETITPWNFEEVVDKGASAQSFIERMTNFDKNLPNEKVLPKHSLLYEYFTVYNELTKVKYVTEGMRKPAFLSGEQKKAIVDLLFKTNRKVTVKQLKEDYFKKIECFDSVEISGVEDRFNASLGTYHDLLKIIKDKDFLDNEENEDILEDIVLTLTLFEDREMIEERLKTYAHLFDDKVMKQLKRRRYTGWGRLSRKLINGIRDKQSGKTILDFLKSDGFANRNFMQLIHDDSLTFKEDIQKAQVSGQGDSLHEHIANLAGSPAIKKGILQTVKVVDELVKVMGRHKPENIVIEMARENQTTQKGQKNSRERMKRIEEGIKELGSQILKEHPVENTQLQNEKLYLYYLQNGRDMYVDQELDINRLSDYDVDHIVPQSFLKDDSIDNKVLTRSDKNRGKSDNVPSEEVVKKMKNYWRQLLNAKLITQRKFDNLTKAERGGLSELDKAGFIKRQLVETRQITKHVAQILDSRMNTKYDENDKLIREVKVITLKSKLVSDFRKDFQFYKVREINNYHHAHDAYLNAVVGTALIKKYPKLESEFVYGDYKVYDVRKMIAKSEQEIGKATAKYFFYSNIMNFFKTEITLANGEIRKRPLIETNGETGEIVWDKGRDFATVRKVLSMPQVNIVKKTEVQTGGFSKESILPKRNSDKLIARKKDWDPKKYGGFDSPTVAYSVLVVAKVEKGKSKKLKSVKELLGITIMERSSFEKNPIDFLEAKGYKEVKKDLIIKLPKYSLFELENGRKRMLASAGELQKGNELALPSKYVNFLYLASHYEKLKGSPGSSGSSGSETPGTSESATPESGSSSGSEVEFSHEYWMRHALTLAKRARDEREVPVGAVLVLNNRVIGEGWNRAIGLHDPTAHAEIMALRQGGLVMQNYRLIDATLYVTFEPCVMCAGAMIHSRIGRVVFGVRNAKTGAAGSLMDVLHYPGMNHRVEITEGILADECAALLCYFFRMPREDNEQKQLFVEQHKHYLDEIIEQISEFSKRVILADANLDKVLSAYNKHRDKPIREQAENIIHLFTLTNLGAPAAFKYFDTTIDRKRYTSTKEVLDATLIHQSITGLYETRIDLSQLGGD

SEQ ID NO: 1327 - protein, 1546 aa, Artificial Sequence
  Description of Artificial Sequence: Synthetic polypeptide
MDKKYSIGLAIGTNSVGWAVITDEYKVPSKKFKVLGNTDRHSIKKNLIGALLFDSGETAEATRLKRTARRRYTRRKNRICYLQEIFSNEMAKVDDSFFHRLEESFLVEEDKKHERHPIFGNIVDEVAYHEKYPTIYHLRKKLVDSTDKADLRLIYLALAHMIKFRGHFLIEGDLNPDNSDVDKLFIQLVQTYNQLFEENPINASGVDAKAILSARLSKSRRLENLIAQLPGEKKNGLFGNLIALSLGLTPNFKSNFDLAEDAKLQLSKDTYDDDLDNLLAQIGDQYADLFLAAKNLSDAILLSDILRVNTEITKAPLSASMIKRYDEHHQDLTLLKALVRQQLPEKYKEIFFDQSKNGYAGYIDGGASQEEFYKFIKPILEKMDGTEELLVKLNREDLLRKQRTFDNGSIPHQIHLGELHAILRRQEDFYPFLKDNREKIEKILTFRIPYYVGPLARGNSRFAWMTRKSEETITPWNFEEVVDKGASAQSFIERMTNFDKNLPNEKVLPKHSLLYEYFTVYNELTKVKYVTEGMRKPAFLSGEQKKAIVDLLFKTNRKVTVKQLKEDYFKKIECFDSVEISGVEDRFNASLGTYHDLLKIIKDKDFLDNEENEDILEDIVLTLTLFEDREMIEERLKTYAHLFDDKVMKQLKRRRYTGWGRLSRKLINGIRDKQSGKTILDFLKSDGFANRNFMQLIHDDSLTFKEDIQKAQVSGQGDSLHEHIANLAGSPAIKKGILQTVKVVDELVKVMGRHKPENIVIEMARENQTTQKGQKNSRERMKRIEEGIKELGSQILKEHPVENTQLQNEKLYLYYLQNGRDMYVDQELDINRLSDYDVDHIVPQSFLKDDSIDNKVLTRSDKNRGKSDNVPSEEVVKKMKNYWRQLLNAKLITQRKFDNLTKAERGGLSELDKAGFIKRQLVETRQITKHVAQILDSRMNTKYDENDKLIREVKVITLKSKLVSDFRKDFQFYKVREINNYHHAHDAYLNAVVGTALIKKYPKLESEFVYGDYKVYDVRKMIAKSEQEIGKATAKYFFYSNIMNFFKTEITLANGEIRKRPLIETNGETGEIVWDKGRDFATVRKVLSMPQVNIVKKTEVQTGGFSKESILPKRNSDKLIARKKDWDPKKYGGFDSPTVAYSVLVVAKVEKGKSKKLKSVKELLGITIMERSSFEKNPIDFLEAKGYKEVKKDLIIKLPKYSLFELENGRKRMLASAGELQKGNELALPSKYVNFLYLASHYEKLKGSPGSSGSSGSETPGTSESATPESGSSSGSEVEFSHEYWMRHALTLAKRARDEREVPVGAVLVLNNRVIGEGWNRAIGLHDPTAHAEIMALRQGGLVMQNYRLIDATLYVTFEPCVMCAGAMIHSRIGRVVFGVRNAKTGAAGSLMDVLHYPGMNHRVEITEGILADECAALLCYFFRMRREDNEQKQLFVEQHKHYLDEIIEQISEFSKRVILADANLDKVLSAYNKHRDKPIREQAENIIHLFTLTNLGAPAAFKYFDTTIDRKRYTSTKEVLDATLIHQSITGLYETRIDLSQLGGD

SEQ ID NO: 1328 - protein, 1546 aa, Artificial Sequence
  Description of Artificial Sequence: Synthetic polypeptide
MDKKYSIGLAIGTNSVGWAVITDEYKVPSKKFKVLGNTDRHSIKKNLIGALLFDSGETAEATRLKRTARRRYTRRKNRICYLQEIFSNEMAKVDDSFFHRLEESFLVEEDKKHERHPIFGNIVDEVAYHEKYPTIYHLRKKLVDSTDKADLRLIYLALAHMIKFRGHFLIEGDLNPDNSDVDKLFIQLVQTYNQLFEENPINASGVDAKAILSARLSKSRRLENLIAQLPGEKKNGLFGNLIALSLGLTPNFKSNFDLAEDAKLQLSKDTYDDDLDNLLAQIGDQYADLFLAAKNLSDAILLSDILRVNTEITKAPLSASMIKRYDEHHQDLTLLKALVRQQLPEKYKEIFFDQSKNGYAGYIDGGASQEEFYKFIKPILEKMDGTEELLVKLNREDLLRKQRTFDNGSIPHQIHLGELHAILRRQEDFYPFLKDNREKIEKILTFRIPYYVGPLARGNSRFAWMTRKSEETITPWNFEEVVDKGASAQSFIERMTNFDKNLPNEKVLPKHSLLYEYFTVYNELTKVKYVTEGMRKPAFLSGEQKKAIVDLLFKTNRKVTVKQLKEDYFKKIECFDSVEISGVEDRFNASLGTYHDLLKIIKDKDFLDNEENEDILEDIVLTLTLFEDREMIEERLKTYAHLFDDKVMKQLKRRRYTGWGRLSRKLINGIRDKQSGKTILDFLKSDGFANRNFMQLIHDDSLTFKEDIQKAQVSGQGDSLHEHIANLAGSPAIKKGILQTVKVVDELVKVMGRHKPENIVIEMARENQTTQKGQKNSRERMKRIEEGIKELGSQILKEHPVENTQLQNEKLYLYYLQNGRDMYVDQELDINRLSDYDVDHIVPQSFLKDDSIDNKVLTRSDKNRGKSDNVPSEEVVKKMKNYWRQLLNAKLITQRKFDNLTKAERGGLSELDKAGFIKRQLVETRQITKHVAQILDSRMNTKYDENDKLIREVKVITLKSKLVSDFRKDFQFYKVREINNYHHAHDAYLNAVVGTALIKKYPKLESEFVYGDYKVYDVRKMIAKSEQEIGKATAKYFFYSNIMNFFKTEITLANGEIRKRPLIETNGETGEIVWDKGRDFATVRKVLSMPQVNIVKKTEVQTGGFSKESILPKRNSDKLIARKKDWDPKKYGGFDSPTVAYSVLVVAKVEKGKSKKLKSVKELLGITIMERSSFEKNPIDFLEAKGYKEVKKDLIIKLPKYSLFELENGRKRMLASAGELQKGNELALPSKYVNFLYLASHYEKLKGSGSSGSSGSETPGTSESATPESGSSSGSEVEFSHEYWMRHALTLAKRARDEREVPVGAVLVLNNRVIGEGWNRAIGLHDPTAHAEIMALRQGGLVMQNYRLIDATLYVTFEPCVMCAGAMIHSRIGRVVFGVRNAKTGAAGSLMDVLHYPGMNHRVEITEGILADECAALLCYFFRMRRPEDNEQKQLFVEQHKHYLDEIIEQISEFSKRVILADANLDKVLSAYNKHRDKPIREQAENIIHLFTLTNLGAPAAFKYFDTTIDRKRYTSTKEVLDATLIHQSITGLYETRIDLSQLGGD

SEQ ID NO: 1329 - protein, 1551 aa, Artificial Sequence
  Description of Artificial Sequence: Synthetic polypeptide
MDKKYSIGLAIGTNSVGWAVITDEYKVPSKKFKVLGNTDRHSIKKNLIGALLFDSGETAEATRLKRTARRRYTRRKNRICYLQEIFSNEMAKVDDSFFHRLEESFLVEEDKKHERHPIFGNIVDEVAYHEKYPTIYHLRKKLVDSTDKADLRLIYLALAHMIKFRGHFLIEGDLNPDNSDVDKLFIQLVQTYNQLFEENPINASGVDAKAILSARLSKSRRLENLIAQLPGEKKNGLFGNLIALSLGLTPNFKSNFDLAEDAKLQLSKDTYDDDLDNLLAQIGDQYADLFLAAKNLSDAILLSDILRVNTEITKAPLSASMIKRYDEHHQDLTLLKALVRQQLPEKYKEIFFDQSKNGYAGYIDGGASQEEFYKFIKPILEKMDGTEELLVKLNREDLLRKQRTFDNGSIPHQIHLGELHAILRRQEDFYPFLKDNREKIEKILTFRIPYYVGPLARGNSRFAWMTRKSEETITPWNFEEVVDKGASAQSFIERMTNFDKNLPNEKVLPKHSLLYEYFTVYNELTKVKYVTEGMRKPAFLSGEQKKAIVDLLFKTNRKVTVKQLKEDYFKKIECFDSVEISGVEDRFNASLGTYHDLLKIIKDKDFLDNEENEDILEDIVLTLTLFEDREMIEERLKTYAHLFDDKVMKQLKRRRYTGWGRLSRKLINGIRDKQSGKTILDFLKSDGFANRNFMQLIHDDSLTFKEDIQKAQVSGQGDSLHEHIANLAGSPAIKKGILQTVKVVDELVKVMGRHKPENIVIEMARENQTTQKGQKNSRERMKRIEEGIKELGSQILKEHPVENTQLQNEKLYLYYLQNGRDMYVDQELDINRLSDYDVDHIVPQSFLKDDSIDNKVLTRSDKNRGKSDNVPSEEVVKKMKNYWRQLLNAKLITQRKFDNLTKAERGGLSELDKAGFIKRQLVETRQITKHVAQILDSRMNTKYDENDKLIREVKVITLKSKLVSDFRKDFQFYKVREINNYHHAHDAYLNAVVGTALIKKYPKLESEFVYGDYKVYDVRKMIAKSEQEIGKATAKYFFYSNIMNFFKTEITLANGEIRKRPLIETNGETGEIVWDKGRDFATVRKVLSMPQVNIVKKTEVQTGGFSKESILPKRNSDKLIARKKDWDPKKYGGFDSPTVAYSVLVVAKVEKGKSKKLKSVKELLGITIMERSSFEKNPIDFLEAKGYKEVKKDLIIKLPKYSLFELENGRKRMLASAGELQKGNELALPSKYVNFLYLASHYEKLKGSPGSSGSSGSETPGTSESATPESGSSGSEVEFSHEYWMRHALTLAKRARDEREVPVGAVLVLNNRVIGEGWNRAHAEIMALRQGGLVMQNYRLIDATLYVTFEPCVMCAGAMIHSRIGRVVFGVRNAKTGAAGSLMDVLHYPGMNHRVEITEGILADECAALLCYFFRMPRQVFNAQKKAQSSTDEDNEQKQLFVEQHKHYLDEIIEQISEFSKRVILADANLDKVLSAYNKHRDKPIREQAENIIHLFTLTNLGAPAAFKYFDTTIDRKRYTSTKEVLDATLIHQSITGLYETRIDLSQLGGD

SEQ ID NO: 1330 - protein, 1546 aa, Artificial Sequence
  Description of Artificial Sequence: Synthetic polypeptide
MDKKYSIGLAIGTNSVGWAVITDEYKVPSKKFKVLGNTDRHSIKKNLIGALLFDSGETAEATRLKRTARRRYTRRKNRICYLQEIFSNEMAKVDDSFFHRLEESFLVEEDKKHERHPIFGNIVDEVAYHEKYPTIYHLRKKLVDSTDKADLRLIYLALAHMIKFRGHFLIEGDLNPDNSDVDKLFIQLVQTYNQLFEENPINASGVDAKAILSARLSKSRRLENLIAQLPGEKKNGLFGNLIALSLGLTPNFKSNFDLAEDAKLQLSKDTYDDDLDNLLAQIGDQYADLFLAAKNLSDAILLSDILRVNTEITKAPLSASMIKRYDEHHQDLTLLKALVRQQLPEKYKEIFFDQSKNGYAGYIDGGASQEEFYKFIKPILEKMDGTEELLVKLNREDLLRKQRTFDNGSIPHQIHLGELHAILRRQEDFYPFLKDNREKIEKILTFRIPYYVGPLARGNSRFAWMTRKSEETITPWNFEEVVDKGASAQSFIERMTNFDKNLPNEKVLPKHSLLYEYFTVYNELTKVKYVTEGMRKPAFLSGEQKKAIVDLLFKTNRKVTVKQLKEDYFKKIECFDSVEISGVEDRFNASLGTYHDLLKIIKDKDFLDNEENEDILEDIVLTLTLFEDREMIEERLKTYAHLFDDKVMKQLKRRRYTGWGRLSRKLINGIRDKQSGKTILDFLKSDGFANRNFMQLIHDDSLTFKEDIQKAQVSGQGDSLHEHIANLAGSPAIKKGILQTVKVVDELVKVMGRHKPENIVIEMARENQTTQKGQKNSRERMKRIEEGIKELGSQILKEHPVENTQLQNEKLYLYYLQNGRDMYVDQELDINRLSDYDVDHIVPQSFLKDDSIDNKVLTRSDKNRGKSDNVPSEEVVKKMKNYWRQLLNAKLITQRKFDNLTKAERGGLSELDKAGFIKRQLVETRQITKHVAQILDSRMNTKYDENDKLIREVKVITLKSKLVSDFRKDFQFYKVREINNYHHAHDAYLNAVVGTALIKKYPKLESEFVYGDYKVYDVRKMIAKSEQEIGKATAKYFFYSNIMNFFKTEITLANGEIRKRPLIETNGETGEIVWDKGRDFATVRKVLSMPQVNIVKKTEVQTGGFSKESILPKRNSDKLIARKKDWDPKKYGGFDSPTVAYSVLVVAKVEKGKSKKLKSVKELLGITIMERSSFEKNPIDFLEAKGYKEVKKDLIIKLPKYSLFELENGRKRMLASAGELQKGNELALPSKYVNFLYLASHYEKLKGSPEGSSGSSGSETPGTSESATPESGSSSGSEVEFSHEYWMRHALTLAKRARDEREVPVGAVLVLNNRVIGEGWNRAIGLHDPTAHAEIMALRQGGLVMQNYRLIDATLYVTFEPCVMCAGAMIHSRIGRVVFGVRNAKTGAAGSLMDVLHYPGMNHRVEITEGILADECAALLCYFFRMRRDNEQKQLFVEQHKHYLDEIIEQISEFSKRVILADANLDKVLSAYNKHRDKPIREQAENIIHLFTLTNLGAPAAFKYFDTTIDRKRYTSTKEVLDATLIHQSITGLYETRIDLSQLGGD

SEQ ID NO: 1331 - protein, 1546 aa, Artificial Sequence
  Description of Artificial Sequence: Synthetic polypeptide
MDKKYSIGLAIGTNSVGWAVITDEYKVPSKKFKVLGNTDRHSIKKNLIGALLFDSGETAEATRLKRTARRRYTRRKNRICYLQEIFSNEMAKVDDSFFHRLEESFLVEEDKKHERHPIFGNIVDEVAYHEKYPTIYHLRKKLVDSTDKADLRLIYLALAHMIKFRGHFLIEGDLNPDNSDVDKLFIQLVQTYNQLFEENPINASGVDAKAILSARLSKSRRLENLIAQLPGEKKNGLFGNLIALSLGLTPNFKSNFDLAEDAKLQLSKDTYDDDLDNLLAQIGDQYADLFLAAKNLSDAILLSDILRVNTEITKAPLSASMIKRYDEHHQDLTLLKALVRQQLPEKYKEIFFDQSKNGYAGYIDGGASQEEFYKFIKPILEKMDGTEELLVKLNREDLLRKQRTFDNGSIPHQIHLGELHAILRRQEDFYPFLKDNREKIEKILTFRIPYYVGPLARGNSRFAWMTRKSEETITPWNFEEVVDKGASAQSFIERMTNFDKNLPNEKVLPKHSLLYEYFTVYNELTKVKYVTEGMRKPAFLSGEQKKAIVDLLFKTNRKVTVKQLKEDYFKKIECFDSVEISGVEDRFNASLGTYHDLLKIIKDKDFLDNEENEDILEDIVLTLTLFEDREMIEERLKTYAHLFDDKVMKQLKRRRYTGWGRLSRKLINGIRDKQSGKTILDFLKSDGFANRNFMQLIHDDSLTFKEDIQKAQVSGQGDSLHEHIANLAGSPAIKKGILQTVKVVDELVKVMGRHKPENIVIEMARENQTTQKGQKNSRERMKRIEEGIKELGSQILKEHPVENTQLQNEKLYLYYLQNGRDMYVDQELDINRLSDYDVDHIVPQSFLKDDSIDNKVLTRSDKNRGKSDNVPSEEVVKKMKNYWRQLLNAKLITQRKFDNLTKAERGGLSELDKAGFIKRQLVETRQITKHVAQILDSRMNTKYDENDKLIREVKVITLKSKLVSDFRKDFQFYKVREINNYHHAHDAYLNAVVGTALIKKYPKLESEFVYGDYKVYDVRKMIAKSEQEIGKATAKYFFYSNIMNFFKTEITLANGEIRKRPLIETNGETGEIVWDKGRDFATVRKVLSMPQVNIVKKTEVQTGGFSKESILPKRNSDKLIARKKDWDPKKYGGFDSPTVAYSVLVVAKVEKGKSKKLKSVKELLGITIMERSSFEKNPIDFLEAKGYKEVKKDLIIKLPKYSLFELENGRKRMLASAGELQKGNELALPSKYVNFLYLASHYEKLKGSPEDGSSGSSGSETPGTSESATPESGSSSGSEVEFSHEYWMRHALTLAKRARDEREVPVGAVLVLNNRVIGEGWNRAIGLHDPTAHAEIMALRQGGLVMQNYRLIDATLYVTFEPCVMCAGAMIHSRIGRVVFGVRNAKTGAAGSLMDVLHYPGMNHRVEITEGILADECAALLCYFFRMRRNEQKQLFVEQHKHYLDEIIEQISEFSKRVILADANLDKVLSAYNKHRDKPIREQAENIIHLFTLTNLGAPAAFKYFDTTIDRKRYTSTKEVLDATLIHQSITGLYETRIDLSQLGGD

SEQ ID NO: 1332 - protein, 1533 aa, Artificial Sequence
  Description of Artificial Sequence: Synthetic polypeptide
MDKKYSIGLAIGTNSVGWAVITDEYKVPSKKFKVLGNTDRHSIKKNLIGALLFDSGETAEATRLKRTARRRYTRRKNRICYLQEIFSNEMAKVDDSFFHRLEESFLVEEDKKHERHPIFGNIVDEVAYHEKYPTIYHLRKKLVDSTDKADLRLIYLALAHMIKFRGHFLIEGDLNPDNSDVDKLFIQLVQTYNQLFEENPINASGVDAKAILSARLSKSRRLENLIAQLPGEKKNGLFGNLIALSLGLTPNFKSNFDLAEDAKLQLSKDTYDDDLDNLLAQIGDQYADLFLAAKNLSDAILLSDILRVNTEITKAPLSASMIKRYDEHHQDLTLLKALVRQQLPEKYKEIFFDQSKNGYAGYIDGGASQEEFYKFIKPILEKMDGTEELLVKLNREDLLRKQRTFDNGSIPHQIHLGELHAILRRQEDFYPFLKDNREKIEKILTFRIPYYVGPLARGNSRFAWMTRKSEETITPWNFEEVVDKGASAQSFIERMTNFDKNLPNEKVLPKHSLLYEYFTVYNELTKVKYVTEGMRKPAFLSGEQKKAIVDLLFKTNRKVTVKQLKEDYFKKIECFDSVEISGVEDRFNASLGTYHDLLKIIKDKDFLDNEENEDILEDIVLTLTLFEDREMIEERLKTYAHLFDDKVMKQLKRRRYTGWGRLSRKLINGIRDKQSGKTILDFLKSDGFANRNFMQLIHDDSLTFKEDIQKAQVSGQGDSLHEHIANLAGSPAIKKGILQTVKVVDELVKVMGRHKPENIVIEMARENQTTQKGQKNSRERMKRIEEGIKELGSQILKEHPVENTQLQNEKLYLYYLQNGRDMYVDQELDINRLSDYDVDHIVPQSFLKDDSIDNKVLTRSDKNRGKSDNVPSEEVVKKMKNYWRQLLNAKLITQRKFDNLTKAERGGLSELDKAGFIKRQLVETRQITKHVAQILDSRMNTKYDENDKLIREVKVITLKSKLVSDFRKDFQFYKVREINNYHHAHDAYLNAVVGTALIKKYPKLESEFVYGDYKVYDVRKMIAKSEQEIGKATAKYFFYSNIMNFFKTEITLANGEIRKRPLIETNGETGEIVWDKGRDFATVRKVLSMPQVNIVKKTEVQTGGFSKESILPKRNSDKLIARKKDWDPKKYGGFDSPTVAYSVLVVAKVEKGKSKKLKSVKELLGITIMERSSFEKNPIDFLEAKGYKEVKKDLIIKLPKYSLFELENGRKRMLASAGELQKGNELALPSKYVNFLYLASHYEKLKGSPGSSGSETPGTSESATPESSGSEVEFSHEYWMRHALTLAKRARDEREVPVGAVLVLNNRVIGEGWNRAHAEIMALRQGGLVMQNYRLIDATLYVTFEPCVMCAGAMIHSRIGRVVFGVRNAKTGAAGSLMDVLHYPGMNHRVEITEGILADECAALLCYFFRMPRQEDNEQKQLFVEQHKHYLDEIIEQISEFSKRVILADANLDKVLSAYNKHRDKPIREQAENIIHLFTLTNLGAPAAFKYFDTTIDRKRYTSTKEVLDATLIHQSITGLYETRIDLSQLGGD

SEQ ID NO: 1333 - protein, 1549 aa, Artificial Sequence
  Description of Artificial Sequence: Synthetic polypeptide
MDKKYSIGLAIGTNSVGWAVITDEYKVPSKKFKVLGNTDRHSIKKNLIGALLFDSGETAEATRLKRTARRRYTRRKNRICYLQEIFSNEMAKVDDSFFHRLEESFLVEEDKKHERHPIFGNIVDEVAYHEKYPTIYHLRKKLVDSTDKADLRLIYLALAHMIKFRGHFLIEGDLNPDNSDVDKLFIQLVQTYNQLFEENPINASGVDAKAILSARLSKSRRLENLIAQLPGEKKNGLFGNLIALSLGLTPNFKSNFDLAEDAKLQLSKDTYDDDLDNLLAQIGDQYADLFLAAKNLSDAILLSDILRVNTEITKAPLSASMIKRYDEHHQDLTLLKALVRQQLPEKYKEIFFDQSKNGYAGYIDGGASQEEFYKFIKPILEKMDGTEELLVKLNREDLLRKQRTFDNGSIPHQIHLGELHAILRRQEDFYPFLKDNREKIEKILTFRIPYYVGPLARGNSRFAWMTRKSEETITPWNFEEVVDKGASAQSFIERMTNFDKNLPNEKVLPKHSLLYEYFTVYNELTKVKYVTEGMRKPAFLSGEQKKAIVDLLFKTNRKVTVKQLKEDYFKKIECFDSVEISGVEDRFNASLGTYHDLLKIIKDKDFLDNEENEDILEDIVLTLTLFEDREMIEERLKTYAHLFDDKVMKQLKRRRYTGWGRLSRKLINGIRDKQSGKTILDFLKSDGFANRNFMQLIHDDSLTFKEDIQKAQVSGQGDSLHEHIANLAGSPAIKKGILQTVKVVDELVKVMGRHKPENIVIEMARENQTTQKGQKNSRERMKRIEEGIKELGSQILKEHPVENTQLQNEKLYLYYLQNGRDMYVDQELDINRLSDYDVDHIVPQSFLKDDSIDNKVLTRSDKNRGKSDNVPSEEVVKKMKNYWRQLLNAKLITQRKFDNLTKAERGGLSELDKAGFIKRQLVETRQITKHVAQILDSRMNTKYDENDKLIREVKVITLKSKLVSDFRKDFQFYKVREINNYHHAHDAYLNAVVGTALSHEYWMRHALTLAKRARDEREVPVGAVLVLNNRVIGEGWNRAIGLHDPTAHAEIMALRQGGLVMQNYRLIDATLYVTFEPCVMCAGAMIHSRIGRVVFGVRNAKTGAAGSLMDVLHYPGMNHRVEITEGILADECAALLCYFFRMPRQVFNAQKKAQSSTDGSSGSETPGTSESATPESSGIKKYPKLESEFVYGDYKVYDVRKMIAKSEQEIGKATAKYFFYSNIMNFFKTEITLANGEIRKRPLIETNGETGEIVWDKGRDFATVRKVLSMPQVNIVKKTEVQTGGFSKESILPKRNSDKLIARKKDWDPKKYGGFDSPTVAYSVLVVAKVEKGKSKKLKSVKELLGITIMERSSFEKNPIDFLEAKGYKEVKKDLIIKLPKYSLFELENGRKRMLASAGELQKGNELALPSKYVNFLYLASHYEKLKGSPEDNEQKQLFVEQHKHYLDEIIEQISEFSKRVILADANLDKVLSAYNKHRDKPIREQAENIIHLFTLTNLGAPAAFKYFDTTIDRKRYTSTKEVLDATLIHQSITGLYETRIDLSQLGGD

SEQ ID NO: 1334 - protein, 1555 aa, Artificial Sequence
  Description of Artificial Sequence: Synthetic polypeptide
MDKKYSIGLAIGTNSVGWAVITDEYKVPSKKFKVLGNTDRHSIKKNLIGALLFDSGETAEATRLKRTARRRYTRRKNRICYLQEIFSNEMAKVDDSFFHRLEESFLVEEDKKHERHPIFGNIVDEVAYHEKYPTIYHLRKKLVDSTDKADLRLIYLALAHMIKFRGHFLIEGDLNPDNSDVDKLFIQLVQTYNQLFEENPINASGVDAKAILSARLSKSRRLENLIAQLPGEKKNGLFGNLIALSLGLTPNFKSNFDLAEDAKLQLSKDTYDDDLDNLLAQIGDQYADLFLAAKNLSDAILLSDILRVNTEITKAPLSASMIKRYDEHHQDLTLLKALVRQQLPEKYKEIFFDQSKNGYAGYIDGGASQEEFYKFIKPILEKMDGTEELLVKLNREDLLRKQRTFDNGSIPHQIHLGELHAILRRQEDFYPFLKDNREKIEKILTFRIPYYVGPLARGNSRFAWMTRKSEETITPWNFEEVVDKGASAQSFIERMTNFDKNLPNEKVLPKHSLLYEYFTVYNELTKVKYVTEGMRKPAFLSGEQKKAIVDLLFKTNRKVTVKQLKEDYFKKIECFDSVEISGVEDRFNASLGTYHDLLKIIKDKDFLDNEENEDILEDIVLTLTLFEDREMIEERLKTYAHLFDDKVMKQLKRRRYTGWGRLSRKLINGIRDKQSGKTILDFLKSDGFANRNFMQLIHDDSLTFKEDIQKAQVSGQGDSLHEHIANLAGSPAIKKGILQTVKVVDELVKVMGRHKPENIVIEMARENQTTQKGQKNSRERMKRIEEGIKELGSQILKEHPVENTQLQNEKLYLYYLQNGRDMYVDQELDINRLSDYDVDHIVPQSFLKDDSIDNKVLTRSDKNRGKSDNVPSEEVVKKMKNYWRQLLNAKLITQRKFDNLTKAERGGLSELDKAGFIKRQLVETRQITKHVAQILDSRMNTKYDENDKLIREVKVITLKSKLVSDFRKDFQFYKVREINNYHHAHDAYLNAVVGTALSHEYWMRHALTLAKRARDEREVPVGAVLVLNNRVIGEGWNRAIGLHDPTAHAEIMALRQGGLVMQNYRLIDATLYVTFEPCVMCAGAMIHSRIGRVVFGVRNAKTGAAGSLMDVLHYPGMNHRVEITEGILADECAALLCYFFRMPRQVFNAQKKAQSSTDGSSGSSGSETPGTSESATPESSGGSSIKKYPKLESEFVYGDYKVYDVRKMIAKSEQEIGKATAKYFFYSNIMNFFKTEITLANGEIRKRPLIETNGETGEIVWDKGRDFATVRKVLSMPQVNIVKKTEVQTGGFSKESILPKRNSDKLIARKKDWDPKKYGGFDSPTVAYSVLVVAKVEKGKSKKLKSVKELLGITIMERSSFEKNPIDFLEAKGYKEVKKDLIIKLPKYSLFELENGRKRMLASAGELQKGNELALPSKYVNFLYLASHYEKLKGSPEDNEQKQLFVEQHKHYLDEIIEQISEFSKRVILADANLDKVLSAYNKHRDKPIREQAENIIHLFTLTNLGAPAAFKYFDTTIDRKRYTSTKEVLDATLIHQSITGLYETRIDLSQLGGD

SEQ ID NO: 1335 - protein, 1421 aa, Artificial Sequence
  Description of Artificial Sequence: Synthetic polypeptide
MDKKYSIGLAIGTNSVGWAVITDEYKVPSKKFKVLGNTDRHSIKKNLIGALLFDSGETAEATRLKRTARRRYTRRKNRICYLQEIFSNEMAKVDDSFFHRLEESFLVEEDKKHERHPIFGNIVDEVAYHEKYPTIYHLRKKLVDSTDKADLRLIYLALAHMIKFRGHFLIEGDLNPDNSDVDKLFIQLVQTYNQLFEENPINASGVDAKAILSARLSKSRRLENLIAQLPGEKKNGLFGNLIALSLGLTPNFKSNFDLAEDAKLQLSKDTYDDDLDNLLAQIGDQYADLFLAAKNLSDAILLSDILRVNTEITKAPLSASMIKRYDEHHQDLTLLKALVRQQLPEKYKEIFFDQSKNGYAGYIDGGASQEEFYKFIKPILEKMDGTEELLVKLNREDLLRKQRTFDNGSIPHQIHLGELHAILRRQEDFYPFLKDNREKIEKILTFRIPYYVGPLARGNSRFAWMTRKSEETITPWNFEEVVDKGASAQSFIERMTNFDKNLPNEKVLPKHSLLYEYFTVYNELTKVKYVTEGMRKPAFLSGEQKKAIVDLLFKTNRKVTVKQLKEDYFKKIECFDSVEISGVEDRFNASLGTYHDLLKIIKDKDFLDNEENEDILEDIVLTLTLFEDREMIEERLKTYAHLFDDKVMKQLKRRRYTGWGRLSRKLINGIRDKQSGKTILDFLKSDGFANRNFMQLIHDDSLTFKEDIQKAQVSGQGDSLHEHIANLAGSPAIKKGILQTVKVVDELVKVMGRHKPENIVIEMARENQTTQKGQKNSRERMKRIEEGIKELGSEVEFSHEYWMRHALTLAKRARDEREVPVGAVLVLNNRVIGEGWNRAIGLHDPTAHAEIMALRQGGLVMQNYRLIDATLYVTFEPCVMCAGAMIHSRIGRVVFGVRNAKTGAAGSLMDVLHYPGMNHRVEITEGILADECAALLCYFFRMPRQVFNAQKKAQSSTDGGLSELDKAGFIKRQLVETRQITKHVAQILDSRMNTKYDENDKLIREVKVITLKSKLVSDFRKDFQFYKVREINNYHHAHDAYLNAVVGTALIKKYPKLESEFVYGDYKVYDVRKMIAKSEQEIGKATAKYFFYSNIMNFFKTEITLANGEIRKRPLIETNGETGEIVWDKGRDFATVRKVLSMPQVNIVKKTEVQTGGFSKESILPKRNSDKLIARKKDWDPKKYGGFDSPTVAYSVLVVAKVEKGKSKKLKSVKELLGITIMERSSFEKNPIDFLEAKGYKEVKKDLIIKLPKYSLFELENGRKRMLASAGELQKGNELALPSKYVNFLYLASHYEKLKGSPEDNEQKQLFVEQHKHYLDEIIEQISEFSKRVILADANLDKVLSAYNKHRDKPIREQAENIIHLFTLTNLGAPAAFKYFDTTIDRKRYTSTKEVLDATLIHQSITGLYETRIDLSQLGGD

SEQ ID NO: 1336 - protein, 1552 aa, Artificial Sequence
  Description of Artificial Sequence: Synthetic polypeptide
MSEVEFSHEYWMRHALTLAKRARDEREVPVGAVLVLNNRVIGEGWNRAIGLHDPTAHAEIMALRQGGLVMQNYRLIDATLYVTFEPCVMCAGAMIHSRIGRVVFGVRNAKTGAAGSLMDVLHYPGMNHRVEITEGILADECAALLCYFFRMPRSGGSSGGSSGSETPGTSESATPESSGGSSGGSDKKYSIGLAIGTNSVGWAVITDEYKVPSKKFKVLGNTDRHSIKKNLIGALLFDSGETAEATRLKRTARRRYTRRKNRICYLQEIFSNEMAKVDDSFFHRLEESFLVEEDKKHERHPIFGNIVDEVAYHEKYPTIYHLRKKLVDSTDKADLRLIYLALAHMIKFRGHFLIEGDLNPDNSDVDKLFIQLVQTYNQLFEENPINASGVDAKAILSARLSKSRRLENLIAQLPGEKKNGLFGNLIALSLGLTPNFKSNFDLAEDAKLQLSKDTYDDDLDNLLAQIGDQYADLFLAAKNLSDAILLSDILRVNTEITKAPLSASMIKRYDEHHQDLTLLKALVRQQLPEKYKEIFFDQSKNGYAGYIDGGASQEEFYKFIKPILEKMDGTEELLVKLNREDLLRKQRTFDNGSIPHQIHLGELHAILRRQEDFYPFLKDNREKIEKILTFRIPYYVGPLARGNSRFAWMTRKSEETITPWNFEEVVDKGASAQSFIERMTNFDKNLPNEKVLPKHSLLYEYFTVYNELTKVKYVTEGMRKPAFLSGEQKKAIVDLLFKTNRKVTVKQLKEDYFKKIECFDSVEISGVEDRFNASLGTYHDLLKIIKDKDFLDNEENEDILEDIVLTLTLFEDREMIEERLKTYAHLFDDKVMKQLKRRRYTGWGRLSRKLINGIRDKQSGKTILDFLKSDGFANRNFMQLIHDDSLTFKEDIQKAQVSGQGDSLHEHIANLAGSPAIKKGILQTVKVVDELVKVMGRHKPENIVIEMARENQTTQKGQKNSRERMKRIEEGIKELGSQILKEHPVENTQLQNEKLYLYYLQNGRDMYVDQELDINRLSDYDVDHIVPQSFLKDDSIDNKVLTRSDKNRGKSDNVPSEEVVKKMKNYWRQLLNAKLITQRKFDNLTKAERGGLSELDKAGFIKRQLVETRQITKHVAQILDSRMNTKYDENDKLIREVKVITLKSKLVSDFRKDFQFYKVREINNYHHAHDAYLNAVVGTALIKKYPKLESEFVYGDYKVYDVRKMIAKSEQEIGKATAKYFFYSNIMNFFKTEITLANGEIRKRPLIETNGETGEIVWDKGRDFATVRKVLSMPQVNIVKKTEVQTGGFSKESILPKRNSDKLIARKKDWDPKKYGGFDSPTVAYSVLVVAKVEKGKSKKLKSVKELLGITIMERSSFEKNPIDFLEAKGYKEVKKDLIIKLPKYSLFELENGRKRMLASAGELQKGNELALPSKYVNFLYLASHYEKLKGSPEDNEQKQLFVEQHKHYLDEIIEQISEFSKRVILADANLDKVLSAYNKHRDKPIREQAENIIHLFTLTNLGAPAAFKYFDTTIDRKRYTSTKEVLDATLIHQSITGLYETRIDLSQLGGD

SEQ ID NO: 1337 - protein, 1545 aa, Artificial Sequence
  Description of Artificial Sequence: Synthetic polypeptide
MSEVEFSHEYWMRHALTLAKRARDEREVPVGAVLVLNNRVIGEGWNRTAHAEIMALRQGGLVMQNYRLIDATLYVTFEPCVMCAGAMIHSRIGRVVFGVRNAKTGAAGSLMDVLHYPGMNHRVEITEGILADECAALLCYFFRMPRSGGSSGGSSGSETPGTSESATPESSGGSSGGSDKKYSIGLAIGTNSVGWAVITDEYKVPSKKFKVLGNTDRHSIKKNLIGALLFDSGETAEATRLKRTARRRYTRRKNRICYLQEIFSNEMAKVDDSFFHRLEESFLVEEDKKHERHPIFGNIVDEVAYHEKYPTIYHLRKKLVDSTDKADLRLIYLALAHMIKFRGHFLIEGDLNPDNSDVDKLFIQLVQTYNQLFEENPINASGVDAKAILSARLSKSRRLENLIAQLPGEKKNGLFGNLIALSLGLTPNFKSNFDLAEDAKLQLSKDTYDDDLDNLLAQIGDQYADLFLAAKNLSDAILLSDILRVNTEITKAPLSASMIKRYDEHHQDLTLLKALVRQQLPEKYKEIFFDQSKNGYAGYIDGGASQEEFYKFIKPILEKMDGTEELLVKLNREDLLRKQRTFDNGSIPHQIHLGELHAILRRQEDFYPFLKDNREKIEKILTFRIPYYVGPLARGNSRFAWMTRKSEETITPWNFEEVVDKGASAQSFIERMTNFDKNLPNEKVLPKHSLLYEYFTVYNELTKVKYVTEGMRKPAFLSGEQKKAIVDLLFKTNRKVTVKQLKEDYFKKIECFDSVEISGVEDRFNASLGTYHDLLKIIKDKDFLDNEENEDILEDIVLTLTLFEDREMIEERLKTYAHLFDDKVMKQLKRRRYTGWGRLSRKLINGIRDKQSGKTILDFLKSDGFANRNFMQLIHDDSLTFKEDIQKAQVSGQGDSLHEHIANLAGSPAIKKGILQTVKVVDELVKVMGRHKPENIVIEMARENQTTQKGQKNSRERMKRIEEGIKELGSQILKEHPVENTQLQNEKLYLYYLQNGRDMYVDQELDINRLSDYDVDHIVPQSFLKDDSIDNKVLTRSDKNRGKSDNVPSEEVVKKMKNYWRQLLNAKLITQRKFDNLTKAERGGLSELDKAGFIKRQLVETRQITKHVAQILDSRMNTKYDENDKLIREVKVITLKSKLVSDFRKDFQFYKVREINNYHHAHDAYLNAVVGTALIKKYPKLESEFVYGDYKVYDVRKMIAKSEQEIGKATAKYFFYSNIMNFFKTEITLANGEIRKRPLIETNGETGEIVWDKGRDFATVRKVLSMPQVNIVKKTEVQTGGFSKESILPKRNSDKLIARKKDWDPKKYGGFDSPTVAYSVLVVAKVEKGKSKKLKSVKELLGITIMERSSFEKNPIDFLEAKGYKEVKKDLIIKLPKYSLFELENGRKRMLASAGELQKGNELALPSKYVNFLYLASHYEKLKGSPEDNEQKQLFVEQHKHYLDEIIEQISEFSKRVILADANLDKVLSAYNKHRDKPIREQAENIIHLFTLTNLGAPAAFKYFDTTIDRKRYTSTKEVLDATLIHQSITGLYETRIDLSQLGGD

SEQ ID NO: 1338 - protein, 1541 aa, Artificial Sequence
  Description of Artificial Sequence: Synthetic polypeptide
MDKKYSIGLAIGTNSVGWAVITDEYKVPSKKFKVLGNTDRHSIKKNLIGALLFDSGETAEATRLKRTARRRYTRRKNRICYLQEIFSNEMAKVDDSFFHRLEESFLVEEDKKHERHPIFGNIVDEVAYHEKYPTIYHLRKKLVDSTDKADLRLIYLALAHMIKFRGHFLIEGDLNPDNSDVDKLFIQLVQTYNQLFEENPINASGVDAKAILSARLSKSRRLENLIAQLPGEKKNGLFGNLIALSLGLTPNFKSNFDLAEDAKLQLSKDTYDDDLDNLLAQIGDQYADLFLAAKNLSDAILLSDILRVNTEITKAPLSASMIKRYDEHHQDLTLLKALVRQQLPEKYKEIFFDQSKNGYAGYIDGGASQEEFYKFIKPILEKMDGTEELLVKLNREDLLRKQRTFDNGSIPHQIHLGELHAILRRQEDFYPFLKDNREKIEKILTFRIPYYVGPLARGNSRFAWMTRKSEETITPWNFEEVVDKGASAQSFIERMTNFDKNLPNEKVLPKHSLLYEYFTVYNELTKVKYVTEGMRKPAFLSGEQKKAIVDLLFKTNRKVTVKQLKEDYFKKIECFDSVEISGVEDRFNASLGTYHDLLKIIKDKDFLDNEENEDILEDIVLTLTLFEDREMIEERLKTYAHLFDDKVMKQLKRRRYTGWGRLSRKLINGIRDKQSGKTILDFLKSDGFANRNFMQLIHDDSLTFKEDIQKAQVSGQGDSLHEHIANLAGSPAIKKGILQTVKVVDELVKVMGRHKPENIVIEMARENQTTQKGQKNSRERMKRIEEGIKELGSQILKEHPVENTQLQNEKLYLYYLQNGRDMYVDQELDINRLSDYDVDHIVPQSFLKDDSIDNKVLTRSDKNRGKSDNVPSEEVVKKMKNYWRQLLNAKLITQRKFDNLTKAERGGLSELDKAGFIKRQLVETRQITKHVAQILDSRMNTKYDENDKLIREVKVITLKSKLVSDFRKDFQFYKVREINNYHHAHDAYLNAVVGTALIKKYPKGSSGSETPGTSESATPESSGSEVEFSHEYWMRHALTLAKRARDEREVPVGAVLVLNNRVIGEGWNRAIGLHDPTAHAEIMALRQGGLVMQNYRLIDATLYVTFEPCVMCAGAMIHSRIGRVVFGVRNAKTGAAGSLMDVLHYPGMNHRVEITEGILADECAALLCYFFRMPRQLESEFVYGDYKVYDVRKMIAKSEQEIGKATAKYFFYSNIMNFFKTEITLANGEIRKRPLIETNGETGEIVWDKGRDFATVRKVLSMPQVNIVKKTEVQTGGFSKESILPKRNSDKLIARKKDWDPKKYGGFDSPTVAYSVLVVAKVEKGKSKKLKSVKELLGITIMERSSFEKNPIDFLEAKGYKEVKKDLIIKLPKYSLFELENGRKRMLASAGELQKGNELALPSKYVNFLYLASHYEKLKGSPEDNEQKQLFVEQHKHYLDEIIEQISEFSKRVILADANLDKVLSAYNKHRDKPIREQAENIIHLFTLTNLGAPAAFKYFDTTIDRKRYTSTKEVLDATLIHQSITGLYETRIDLSQLGGD

SEQ ID NO: 1339 - protein, 1541 aa, Artificial Sequence
  Description of Artificial Sequence: Synthetic polypeptide
MDKKYSIGLAIGTNSVGWAVITDEYKVPSKKFKVLGNTDRHSIKKNLIGALLFDSGETAEATRLKRTARRRYTRRKNRICYLQEIFSNEMAKVDDSFFHRLEESFLVEEDKKHERHPIFGNIVDEVAYHEKYPTIYHLRKKLVDSTDKADLRLIYLALAHMIKFRGHFLIEGDLNPDNSDVDKLFIQLVQTYNQLFEENPINASGVDAKAILSARLSKSRRLENLIAQLPGEKKNGLFGNLIALSLGLTPNFKSNFDLAEDAKLQLSKDTYDDDLDNLLAQIGDQYADLFLAAKNLSDAILLSDILRVNTEITKAPLSASMIKRYDEHHQDLTLLKALVRQQLPEKYKEIFFDQSKNGYAGYIDGGASQEEFYKFIKPILEKMDGTEELLVKLNREDLLRKQRTFDNGSIPHQIHLGELHAILRRQEDFYPFLKDNREKIEKILTFRIPYYVGPLARGNSRFAWMTRKSEETITPWNFEEVVDKGASAQSFIERMTNFDKNLPNEKVLPKHSLLYEYFTVYNELTKVKYVTEGMRKPAFLSGEQKKAIVDLLFKTNRKVTVKQLKEDYFKKIECFDSVEISGVEDRFNASLGTYHDLLKIIKDKDFLDNEENEDILEDIVLTLTLFEDREMIEERLKTYAHLFDDKVMKQLKRRRYTGWGRLSRKLINGIRDKQSGKTILDFLKSDGFANRNFMQLIHDDSLTFKEDIQKAQVSGQGDSLHEHIANLAGSPAIKKGILQTVKVVDELVKVMGRHKPENIVIEMARENQTTQKGQKNSRERMKRIEEGIKELGSQILKEHPVENTQLQNEKLYLYYLQNGRDMYVDQELDINRLSDYDVDHIVPQSFLKDDSIDNKVLTRSDKNRGKSDNVPSEEVVKKMKNYWRQLLNAKLITQRKFDNLTKAERGGLSELDKAGFIKRQLVETRQITKHVAQILDSRMNTKYDENDKLIREVKVITLKSKLVSDFRKDFQFYKVREINNYHHAHDAYLNAVVGTALIKKYPKLGSSGSETPGTSESATPESSGSEVEFSHEYWMRHALTLAKRARDEREVPVGAVLVLNNRVIGEGWNRAIGLHDPTAHAEIMALRQGGLVMQNYRLIDATLYVTFEPCVMCAGAMIHSRIGRVVFGVRNAKTGAAGSLMDVLHYPGMNHRVEITEGILADECAALLCYFFRMPRQESEFVYGDYKVYDVRKMIAKSEQEIGKATAKYFFYSNIMNFFKTEITLANGEIRKRPLIETNGETGEIVWDKGRDFATVRKVLSMPQVNIVKKTEVQTGGFSKESILPKRNSDKLIARKKDWDPKKYGGFDSPTVAYSVLVVAKVEKGKSKKLKSVKELLGITIMERSSFEKNPIDFLEAKGYKEVKKDLIIKLPKYSLFELENGRKRMLASAGELQKGNELALPSKYVNFLYLASHYEKLKGSPEDNEQKQLFVEQHKHYLDEIIEQISEFSKRVILADANLDKVLSAYNKHRDKPIREQAENIIHLFTLTNLGAPAAFKYFDTTIDRKRYTSTKEVLDATLIHQSITGLYETRIDLSQLGGD

SEQ ID NO: 1340 - protein, 1541 aa, Artificial Sequence
  Description of Artificial Sequence: Synthetic polypeptide
MDKKYSIGLAIGTNSVGWAVITDEYKVPSKKFKVLGNTDRHSIKKNLIGALLFDSGETAEATRLKRTARRRYTRRKNRICYLQEIFSNEMAKVDDSFFHRLEESFLVEEDKKHERHPIFGNIVDEVAYHEKYPTIYHLRKKLVDSTDKADLRLIYLALAHMIKFRGHFLIEGDLNPDNSDVDKLFIQLVQTYNQLFEENPINASGVDAKAILSARLSKSRRLENLIAQLPGEKKNGLFGNLIALSLGLTPNFKSNFDLAEDAKLQLSKDTYDDDLDNLLAQIGDQYADLFLAAKNLSDAILLSDILRVNTEITKAPLSASMIKRYDEHHQDLTLLKALVRQQLPEKYKEIFFDQSKNGYAGYIDGGASQEEFYKFIKPILEKMDGTEELLVKLNREDLLRKQRTFDNGSIPHQIHLGELHAILRRQEDFYPFLKDNREKIEKILTFRIPYYVGPLARGNSRFAWMTRKSEETITPWNFEEVVDKGASAQSFIERMTNFDKNLPNEKVLPKHSLLYEYFTVYNELTKVKYVTEGMRKPAFLSGEQKKAIVDLLFKTNRKVTVKQLKEDYFKKIECFDSVEISGVEDRFNASLGTYHDLLKIIKDKDFLDNEENEDILEDIVLTLTLFEDREMIEERLKTYAHLFDDKVMKQLKRRRYTGWGRLSRKLINGIRDKQSGKTILDFLKSDGFANRNFMQLIHDDSLTFKEDIQKAQVSGQGDSLHEHIANLAGSPAIKKGILQTVKVVDELVKVMGRHKPENIVIEMARENQTTQKGQKNSRERMKRIEEGIKELGSQILKEHPVENTQLQNEKLYLYYLQNGRDMYVDQELDINRLSDYDVDHIVPQSFLKDDSIDNKVLTRSDKNRGKSDNVPSEEVVKKMKNYWRQLLNAKLITQRKFDNLTKAERGGLSELDKAGFIKRQLVETRQITKHVAQILDSRMNTKYDENDKLIREVKVITLKSKLVSDFRKDFQFYKVREINNYHHAHDAYLNAVVGTALIKKYPKLEGSSGSETPGTSESATPESSGSEVEFSHEYWMRHALTLAKRARDEREVPVGAVLVLNNRVIGEGWNRAIGLHDPTAHAEIMALRQGGLVMQNYRLIDATLYVTFEPCVMCAGAMIHSRIGRVVFGVRNAKTGAAGSLMDVLHYPGMNHRVEITEGILADECAALLCYFFRMPRQSEFVYGDYKVYDVRKMIAKSEQEIGKATAKYFFYSNIMNFFKTEITLANGEIRKRPLIETNGETGEIVWDKGRDFATVRKVLSMPQVNIVKKTEVQTGGFSKESILPKRNSDKLIARKKDWDPKKYGGFDSPTVAYSVLVVAKVEKGKSKKLKSVKELLGITIMERSSFEKNPIDFLEAKGYKEVKKDLIIKLPKYSLFELENGRKRMLASAGELQKGNELALPSKYVNFLYLASHYEKLKGSPEDNEQKQLFVEQHKHYLDEIIEQISEFSKRVILADANLDKVLSAYNKHRDKPIREQAENIIHLFTLTNLGAPAAFKYFDTTIDRKRYTSTKEVLDATLIHQSITGLYETRIDLSQLGGD

SEQ ID NO: 1341 - protein, 1541 aa, Artificial Sequence
  Description of Artificial Sequence: Synthetic polypeptide
MDKKYSIGLAIGTNSVGWAVITDEYKVPSKKFKVLGNTDRHSIKKNLIGALLFDSGETAEATRLKRTARRRYTRRKNRICYLQEIFSNEMAKVDDSFFHRLEESFLVEEDKKHERHPIFGNIVDEVAYHEKYPTIYHLRKKLVDSTDKADLRLIYLALAHMIKFRGHFLIEGDLNPDNSDVDKLFIQLVQTYNQLFEENPINASGVDAKAILSARLSKSRRLENLIAQLPGEKKNGLFGNLIALSLGLTPNFKSNFDLAEDAKLQLSKDTYDDDLDNLLAQIGDQYADLFLAAKNLSDAILLSDILRVNTEITKAPLSASMIKRYDEHHQDLTLLKALVRQQLPEKYKEIFFDQSKNGYAGYIDGGASQEEFYKFIKPILEKMDGTEELLVKLNREDLLRKQRTFDNGSIPHQIHLGELHAILRRQEDFYPFLKDNREKIEKILTFRIPYYVGPLARGNSRFAWMTRKSEETITPWNFEEVVDKGASAQSFIERMTNFDKNLPNEKVLPKHSLLYEYFTVYNELTKVKYVTEGMRKPAFLSGEQKKAIVDLLFKTNRKVTVKQLKEDYFKKIECFDSVEISGVEDRFNASLGTYHDLLKIIKDKDFLDNEENEDILEDIVLTLTLFEDREMIEERLKTYAHLFDDKVMKQLKRRRYTGWGRLSRKLINGIRDKQSGKTILDFLKSDGFANRNFMQLIHDDSLTFKEDIQKAQVSGQGDSLHEHIANLAGSPAIKKGILQTVKVVDELVKVMGRHKPENIVIEMARENQTTQKGQKNSRERMKRIEEGIKELGSQILKEHPVENTQLQNEKLYLYYLQNGRDMYVDQELDINRLSDYDVDHIVPQSFLKDDSIDNKVLTRSDKNRGKSDNVPSEEVVKKMKNYWRQLLNAKLITQRKFDNLTKAERGGLSELDKAGFIKRQLVETRQITKHVAQILDSRMNTKYDENDKLIREVKVITLKSKLVSDFRKDFQFYKVREINNYHHAHDAYLNAVVGTALIKKYPKLESGSSGSETPGTSESATPESSGSEVEFSHEYWMRHALTLAKRARDEREVPVGAVLVLNNRVIGEGWNRAIGLHDPTAHAEIMALRQGGLVMQNYRLIDATLYVTFEPCVMCAGAMIHSRIGRVVFGVRNAKTGAAGSLMDVLHYPGMNHRVEITEGILADECAALLCYFFRMPRQEFVYGDYKVYDVRKMIAKSEQEIGKATAKYFFYSNIMNFFKTEITLANGEIRKRPLIETNGETGEIVWDKGRDFATVRKVLSMPQVNIVKKTEVQTGGFSKESILPKRNSDKLIARKKDWDPKKYGGFDSPTVAYSVLVVAKVEKGKSKKLKSVKELLGITIMERSSFEKNPIDFLEAKGYKEVKKDLIIKLPKYSLFELENGRKRMLASAGELQKGNELALPSKYVNFLYLASHYEKLKGSPEDNEQKQLFVEQHKHYLDEIIEQISEFSKRVILADANLDKVLSAYNKHRDKPIREQAENIIHLFTLTNLGAPAAFKYFDTTIDRKRYTSTKEVLDATLIHQSITGLYETRIDLSQLGGD

SEQ ID NO: 1342 - protein, 1541 aa, Artificial Sequence
  Description of Artificial Sequence: Synthetic polypeptide
MDKKYSIGLAIGTNSVGWAVITDEYKVPSKKFKVLGNTDRHSIKKNLIGALLFDSGETAEATRLKRTARRRYTRRKNRICYLQEIFSNEMAKVDDSFFHRLEESFLVEEDKKHERHPIFGNIVDEVAYHEKYPTIYHLRKKLVDSTDKADLRLIYLALAHMIKFRGHFLIEGDLNPDNSDVDKLFIQLVQTYNQLFEENPINASGVDAKAILSARLSKSRRLENLIAQLPGEKKNGLFGNLIALSLGLTPNFKSNFDLAEDAKLQLSKDTYDDDLDNLLAQIGDQYADLFLAAKNLSDAILLSDILRVNTEITKAPLSASMIKRYDEHHQDLTLLKALVRQQLPEKYKEIFFDQSKNGYAGYIDGGASQEEFYKFIKPILEKMDGTEELLVKLNREDLLRKQRTFDNGSIPHQIHLGELHAILRRQEDFYPFLKDNREKIEKILTFRIPYYVGPLARGNSRFAWMTRKSEETITPWNFEEVVDKGASAQSFIERMTNFDKNLPNEKVLPKHSLLYEYFTVYNELTKVKYVTEGMRKPAFLSGEQKKAIVDLLFKTNRKVTVKQLKEDYFKKIECFDSVEISGVEDRFNASLGTYHDLLKIIKDKDFLDNEENEDILEDIVLTLTLFEDREMIEERLKTYAHLFDDKVMKQLKRRRYTGWGRLSRKLINGIRDKQSGKTILDFLKSDGFANRNFMQLIHDDSLTFKEDIQKAQVSGQGDSLHEHIANLAGSPAIKKGILQTVKVVDELVKVMGRHKPENIVIEMARENQTTQKGQKNSRERMKRIEEGIKELGGSSGSETPGTSESATPESSGSEVEFSHEYWMRHALTLAKRARDEREVPVGAVLVLNNRVIGEGWNRAIGLHDPTAHAEIMALRQGGLVMQNYRLIDATLYVTFEPCVMCAGAMIHSRIGRVVFGVRNAKTGAAGSLMDVLHYPGMNHRVEITEGILADECAALLCYFFRMPRQSQILKEHPVENTQLQNEKLYLYYLQNGRDMYVDQELDINRLSDYDVDHIVPQSFLKDDSIDNKVLTRSDKNRGKSDNVPSEEVVKKMKNYWRQLLNAKLITQRKFDNLTKAERGGLSELDKAGFIKRQLVETRQITKHVAQILDSRMNTKYDENDKLIREVKVITLKSKLVSDFRKDFQFYKVREINNYHHAHDAYLNAVVGTALIKKYPKLESEFVYGDYKVYDVRKMIAKSEQEIGKATAKYFFYSNIMNFFKTEITLANGEIRKRPLIETNGETGEIVWDKGRDFATVRKVLSMPQVNIVKKTEVQTGGFSKESILPKRNSDKLIARKKDWDPKKYGGFDSPTVAYSVLVVAKVEKGKSKKLKSVKELLGITIMERSSFEKNPIDFLEAKGYKEVKKDLIIKLPKYSLFELENGRKRMLASAGELQKGNELALPSKYVNFLYLASHYEKLKGSPEDNEQKQLFVEQHKHYLDEIIEQISEFSKRVILADANLDKVLSAYNKHRDKPIREQAENIIHLFTLTNLGAPAAFKYFDTTIDRKRYTSTKEVLDATLIHQSITGLYETRIDLSQLGGD

SEQ ID NO: 1343 - protein, 1541 aa, Artificial Sequence
  Description of Artificial Sequence: Synthetic polypeptide
MDKKYSIGLAIGTNSVGWAVITDEYKVPSKKFKVLGNTDRHSIKKNLIGALLFDSGETAEATRLKRTARRRYTRRKNRICYLQEIFSNEMAKVDDSFFHRLEESFLVEEDKKHERHPIFGNIVDEVAYHEKYPTIYHLRKKLVDSTDKADLRLIYLALAHMIKFRGHFLIEGDLNPDNSDVDKLFIQLVQTYNQLFEENPINASGVDAKAILSARLSKSRRLENLIAQLPGEKKNGLFGNLIALSLGLTPNFKSNFDLAEDAKLQLSKDTYDDDLDNLLAQIGDQYADLFLAAKNLSDAILLSDILRVNTEITKAPLSASMIKRYDEHHQDLTLLKALVRQQLPEKYKEIFFDQSKNGYAGYIDGGASQEEFYKFIKPILEKMDGTEELLVKLNREDLLRKQRTFDNGSIPHQIHLGELHAILRRQEDFYPFLKDNREKIEKILTFRIPYYVGPLARGNSRFAWMTRKSEETITPWNFEEVVDKGASAQSFIERMTNFDKNLPNEKVLPKHSLLYEYFTVYNELTKVKYVTEGMRKPAFLSGEQKKAIVDLLFKTNRKVTVKQLKEDYFKKIECFDSVEISGVEDRFNASLGTYHDLLKIIKDKDFLDNEENEDILEDIVLTLTLFEDREMIEERLKTYAHLFDDKVMKQLKRRRYTGWGRLSRKLINGIRDKQSGKTILDFLKSDGFANRNFMQLIHDDSLTFKEDIQKAQVSGQGDSLHEHIANLAGSPAIKKGILQTVKVVDELVKVMGRHKPENIVIEMARENQTTQKGQKNSRERMKRIEEGIKELGSSGSETPGTSESATPESSGSEVEFSHEYWMRHALTLAKRARDEREVPVGAVLVLNNRVIGEGWNRAIGLHDPTAHAEIMALRQGGLVMQNYRLIDATLYVTFEPCVMCAGAMIHSRIGRVVFGVRNAKTGAAGSLMDVLHYPGMNHRVEITEGILADECAALLCYFFRMPRQGSQILKEHPVENTQLQNEKLYLYYLQNGRDMYVDQELDINRLSDYDVDHIVPQSFLKDDSIDNKVLTRSDKNRGKSDNVPSEEVVKKMKNYWRQLLNAKLITQRKFDNLTKAERGGLSELDKAGFIKRQLVETRQITKHVAQILDSRMNTKYDENDKLIREVKVITLKSKLVSDFRKDFQFYKVREINNYHHAHDAYLNAVVGTALIKKYPKLESEFVYGDYKVYDVRKMIAKSEQEIGKATAKYFFYSNIMNFFKTEITLANGEIRKRPLIETNGETGEIVWDKGRDFATVRKVLSMPQVNIVKKTEVQTGGFSKESILPKRNSDKLIARKKDWDPKKYGGFDSPTVAYSVLVVAKVEKGKSKKLKSVKELLGITIMERSSFEKNPIDFLEAKGYKEVKKDLIIKLPKYSLFELENGRKRMLASAGELQKGNELALPSKYVNFLYLASHYEKLKGSPEDNEQKQLFVEQHKHYLDEIIEQISEFSKRVILADANLDKVLSAYNKHRDKPIREQAENIIHLFTLTNLGAPAAFKYFDTTIDRKRYTSTKEVLDATLIHQSITGLYETRIDLSQLGGD

SEQ ID NO: 1344 - protein, 1541 aa, Artificial Sequence
  Description of Artificial Sequence: Synthetic polypeptide
MDKKYSIGLAIGTNSVGWAVITDEYKVPSKKFKVLGNTDRHSIKKNLIGALLFDSGETAEATRLKRTARRRYTRRKNRICYLQEIFSNEMAKVDDSFFHRLEESFLVEEDKKHERHPIFGNIVDEVAYHEKYPTIYHLRKKLVDSTDKADLRLIYLALAHMIKFRGHFLIEGDLNPDNSDVDKLFIQLVQTYNQLFEENPINASGVDAKAILSARLSKSRRLENLIAQLPGEKKNGLFGNLIALSLGLTPNFKSNFDLAEDAKLQLSKDTYDDDLDNLLAQIGDQYADLFLAAKNLSDAILLSDILRVNTEITKAPLSASMIKRYDEHHQDLTLLKALVRQQLPEKYKEIFFDQSKNGYAGYIDGGASQEEFYKFIKPILEKMDGTEELLVKLNREDLLRKQRTFDNGSIPHQIHLGELHAILRRQEDFYPFLKDNREKIEKILTFRIPYYVGPLARGNSRFAWMTRKSEETITPWNFEEVVDKGASAQSFIERMTNFDKNLPNEKVLPKHSLLYEYFTVYNELTKVKYVTEGMRKPAFLSGEQKKAIVDLLFKTNRKVTVKQLKEDYFKKIECFDSVEISGVEDRFNASLGTYHDLLKIIKDKDFLDNEENEDILEDIVLTLTLFEDREMIEERLKTYAHLFDDKVMKQLKRRRYTGWGRLSRKLINGIRDKQSGKTILDFLKSDGFANRNFMQLIHDDSLTFKEDIQKAQVSGQGDSLHEHIANLAGSPAIKKGILQTVKVVDELVKVMGRHKPENIVIEMARENQTTQKGQKNSRERMKRIEEGIKEGSSGSETPGTSESATPESSGSEVEFSHEYWMRHALTLAKRARDEREVPVGAVLVLNNRVIGEGWNRAIGLHDPTAHAEIMALRQGGLVMQNYRLIDATLYVTFEPCVMCAGAMIHSRIGRVVFGVRNAKTGAAGSLMDVLHYPGMNHRVEITEGILADECAALLCYFFRMPRQLGSQILKEHPVENTQLQNEKLYLYYLQNGRDMYVDQELDINRLSDYDVDHIVPQSFLKDDSIDNKVLTRSDKNRGKSDNVPSEEVVKKMKNYWRQLLNAKLITQRKFDNLTKAERGGLSELDKAGFIKRQLVETRQITKHVAQILDSRMNTKYDENDKLIREVKVITLKSKLVSDFRKDFQFYKVREINNYHHAHDAYLNAVVGTALIKKYPKLESEFVYGDYKVYDVRKMIAKSEQEIGKATAKYFFYSNIMNFFKTEITLANGEIRKRPLIETNGETGEIVWDKGRDFATVRKVLSMPQVNIVKKTEVQTGGFSKESILPKRNSDKLIARKKDWDPKKYGGFDSPTVAYSVLVVAKVEKGKSKKLKSVKELLGITIMERSSFEKNPIDFLEAKGYKEVKKDLIIKLPKYSLFELENGRKRMLASAGELQKGNELALPSKYVNFLYLASHYEKLKGSPEDNEQKQLFVEQHKHYLDEIIEQISEFSKRVILADANLDKVLSAYNKHRDKPIREQAENIIHLFTLTNLGAPAAFKYFDTTIDRKRYTSTKEVLDATLIHQSITGLYETRIDLSQLGGD

SEQ ID NO: 1345 - protein, 1484 aa, Artificial Sequence
  Description of Artificial Sequence: Synthetic polypeptide
MDKKYSIGLAIGTNSVGWAVITDEYKVPSKKFKVLGNTDRHSIKKNLIGALLFDSGETAEATRLKRTARRRYTRRKNRICYLQEIFSNEMAKVDDSFFHRLEESFLVEEDKKHERHPIFGNIVDEVAYHEKYPTIYHLRKKLVDSTDKADLRLIYLALAHMIKFRGHFLIEGDLNPDNSDVDKLFIQLVQTYNQLFEENPINASGVDAKAILSARLSKSRRLENLIAQLPGEKKNGLFGNLIALSLGLTPNFKSNFDLAEDAKLQLSKDTYDDDLDNLLAQIGDQYADLFLAAKNLSDAILLSDILRVNTEITKAPLSASMIKRYDEHHQDLTLLKALVRQQLPEKYKEIFFDQSKNGYAGYIDGGASQEEFYKFIKPILEKMDGTEELLVKLNREDLLRKQRTFDNGSIPHQIHLGELHAILRRQEDFYPFLKDNREKIEKILTFRIPYYVGPLARGNSRFAWMTRKSEETITPWNFEEVVDKGASAQSFIERMTNFDKNLPNEKVLPKHSLLYEYFTVYNELTKVKYVTEGMRKPAFLSGEQKKAIVDLLFKTNRKVTVKQLKEDYFKKIECFDSVEISGVEDRFNASLGTYHDLLKIIKDKDFLDNEENEDILEDIVLTLTLFEDREMIEERLKTYAHLFDDKVMKQLKRRRYTGWGRLSRKLINGIRDKQSGKTILDFLKSDGFANRNFMQLIHDDSLTFKEDIQKAQVSGQGDSLHEHIANLAGSPAIKKGILQTVKVVDELVKVMGRHKPENIVIEMARENQTTQKGQKNSRERMKRIEEGIKELGSQILKEHPVENTQLQNEKLYLYYLQNGRDMYVDQELDINRLSDYDVDHIVPQSFLKDDSIDNKVLTRSDKNRGKSDNVPSEEVVKKMKNYWRQLLNAKLITQRKFDNLTKAERGGLSELDKAGFIKRQLVETRQITKHVAQILDSRMNTKYDENDKLIREVKVITLKSKLVSDFRKDFQFYKVREINNYHHAHDAYLNAVVGTALIKKYPKLESEFVYGDYKVYSSGSEVEFSHEYWMRHALTLAKRARDEREVPVGAVLVLNNRVIGEGWNRAIGLHDPTAHAEIMALRQGGLVMQNYRLIDATLYVTFEPCVMCAGAMIHSRIGRVVFGVRNAKTGAAGSLMDVLHYPGMNHRVEITEGILADECAALLCYFFRMPRQVFNAQKKAQSSTDGEIVWDKGRDFATVRKVLSMPQVNIVKKTEVQTGGFSKESILPKRNSDKLIARKKDWDPKKYGGFDSPTVAYSVLVVAKVEKGKSKKLKSVKELLGITIMERSSFEKNPIDFLEAKGYKEVKKDLIIKLPKYSLFELENGRKRMLASAGELQKGNELALPSKYVNFLYLASHYEKLKGSPEDNEQKQLFVEQHKHYLDEIIEQISEFSKRVILADANLDKVLSAYNKHRDKPIREQAENIIHLFTLTNLGAPAAFKYFDTTIDRKRYTSTKEVLDATLIHQSITGLYETRIDLSQLGGD

SEQ ID NO: 1346 - protein, 1554 aa, Artificial Sequence
  Description of Artificial Sequence: Synthetic polypeptide
MDKKYSIGLAIGTNSVGWAVITDEYKVPSKKFKVLGNTDRHSIKKNLIGALLFDSGETAEATRLKRTARRRYTRRKNRICYLQEIFSNEMAKVDDSFFHRLEESFLVEEDKKHERHPIFGNIVDEVAYHEKYPTIYHLRKKLVDSTDKADLRLIYLALAHMIKFRGHFLIEGDLNPDNSDVDKLFIQLVQTYNQLFEENPINASGVDAKAILSARLSKSRRLENLIAQLPGEKKNGLFGNLIALSLGLTPNFKSNFDLAEDAKLQLSKDTYDDDLDNLLAQIGDQYADLFLAAKNLSDAILLSDILRVNTEITKAPLSASMIKRYDEHHQDLTLLKALVRQQLPEKYKEIFFDQSKNGYAGYIDGGASQEEFYKFIKPILEKMDGTEELLVKLNREDLLRKQRTFDNGSIPHQIHLGELHAILRRQEDFYPFLKDNREKIEKILTFRIPYYVGPLARGNSRFAWMTRKSEETITPWNFEEVVDKGASAQSFIERMTNFDKNLPNEKVLPKHSLLYEYFTVYNELTKVKYVTEGMRKPAFLSGEQKKAIVDLLFKTNRKVTVKQLKEDYFKKIECFDSVEISGVEDRFNASLGTYHDLLKIIKDKDFLDNEENEDILEDIVLTLTLFEDREMIEERLKTYAHLFDDKVMKQLKRRRYTGWGRLSRKLINGIRDKQSGKTILDFLKSDGFANRNFMQLIHDDSLTFKEDIQKAQVSGQGDSLHEHIANLAGSPAIKKGILQTVKVVDELVKVMGRHKPENIVIEMARENQTTQKGQKNSRERMKRIEEGIKELGSQILKEHPVENTQLQNEKLYLYYLQNGRDMYVDQELDINRLSDYDVDHIVPQSFLKDDSIDNKVLTRSDKNRGKSDNVPSEEVVKKMKNYWRQLLNAKLITQRKFDNLTKAERGGLSELDKAGFIKRQLVETRQITKHVAQILDSRMNTKYDENDKLIREVKVITLKSKLVSDFRKDFQFYKVREINNYHHAHDAYLNAVVGTALIKKYPKLESEFVYGDYKVYDVRKMIAKSEQEIGKATAKYFFYSNIMNFFKTEITLANGEIRKRPLIETNMNHRVEITEGILADECAALLCYFFRMPRQVFNAQKKAQSSTDGSSGSETPGTSESATPESSGSEVEFSHEYWMRHALTLAKRARDEREVPVGAVLVLNNRVIGEGWNRAIGLHDPTAHAEIMALRQGGLVMQNYRLIDATLYVTFEPCVMCAGAMIHSRIGRVVFGVRNAKTGAAGSLMDVLHYPGGETGEIVWDKGRDFATVRKVLSMPQVNIVKKTEVQTGGFSKESILPKRNSDKLIARKKDWDPKKYGGFDSPTVAYSVLVVAKVEKGKSKKLKSVKELLGITIMERSSFEKNPIDFLEAKGYKEVKKDLIIKLPKYSLFELENGRKRMLASAGELQKGNELALPSKYVNFLYLASHYEKLKGSPEDNEQKQLFVEQHKHYLDEIIEQISEFSKRVILADANLDKVLSAYNKHRDKPIREQAENIIHLFTLTNLGAPAAFKYFDTTIDRKRYTSTKEVLDATLIHQSITGLYETRIDLSQLGGD

SEQ ID NO: 1347 - protein, 1554 aa, Artificial Sequence
  Description of Artificial Sequence: Synthetic polypeptide
MDKKYSIGLAIGTNSVGWAVITDEYKVPSKKFKVLGNTDRHSIKKNLIGALLFDSGETAEATRLKRTARRRYTRRKNRICYLQEIFSNEMAKVDDSFFHRLEESFLVEEDKKHERHPIFGNIVDEVAYHEKYPTIYHLRKKLVDSTDKADLRLIYLALAHMIKFRGHFLIEGDLNPDNSDVDKLFIQLVQTYNQLFEENPINASGVDAKAILSARLSKSRRLENLIAQLPGEKKNGLFGNLIALSLGLTPNFKSNFDLAEDAKLQLSKDTYDDDLDNLLAQIGDQYADLFLAAKNLSDAILLSDILRVNTEITKAPLSASMIKRYDEHHQDLTLLKALVRQQLPEKYKEIFFDQSKNGYAGYIDGGASQEEFYKFIKPILEKMDGTEELLVKLNREDLLRKQRTFDNGSIPHQIHLGELHAILRRQEDFYPFLKDNREKIEKILTFRIPYYVGPLARGNSRFAWMTRKSEETITPWNFEEVVDKGASAQSFIERMTNFDKNLPNEKVLPKHSLLYEYFTVYNELTKVKYVTEGMRKPAFLSGEQKKAIVDLLFKTNRKVTVKQLKEDYFKKIECFDSVEISGVEDRFNASLGTYHDLLKIIKDKDFLDNEENEDILEDIVLTLTLFEDREMIEERLKTYAHLFDDKVMKQLKRRRYTGWGRLSRKLINGIRDKQSGKTILDFLKSDGFANRNFMQLIHDDSGSSGSETPGTSESATPESSGSEVEFSHEYWMRHALTLAKRARDEREVPVGAVLVLNNRVIGEGWNRAIGLHDPTAHAEIMALRQGGLVMQNYRLIDATLYVTFEPCVMCAGAMIHSRIGRVVFGVRNAKTGAAGSLMDVLHYPGMNHRVEITEGILADECAALLCYFFRMPRQVFNAQKKAQSSTDLTFKEDIQKAQVSGQGDSLHEHIANLAGSPAIKKGILQTVKVVDELVKVMGRHKPENIVIEMARENQTTQKGQKNSRERMKRIEEGIKELGSQILKEHPVENTQLQNEKLYLYYLQNGRDMYVDQELDINRLSDYDVDHIVPQSFLKDDSIDNKVLTRSDKNRGKSDNVPSEEVVKKMKNYWRQLLNAKLITQRKFDNLTKAERGGLSELDKAGFIKRQLVETRQITKHVAQILDSRMNTKYDENDKLIREVKVITLKSKLVSDFRKDFQFYKVREINNYHHAHDAYLNAVVGTALIKKYPKLESEFVYGDYKVYDVRKMIAKSEQEIGKATAKYFFYSNIMNFFKTEITLANGEIRKRPLIETNGETGEIVWDKGRDFATVRKVLSMPQVNIVKKTEVQTGGFSKESILPKRNSDKLIARKKDWDPKKYGGFDSPTVAYSVLVVAKVEKGKSKKLKSVKELLGITIMERSSFEKNPIDFLEAKGYKEVKKDLIIKLPKYSLFELENGRKRMLASAGELQKGNELALPSKYVNFLYLASHYEKLKGSPEDNEQKQLFVEQHKHYLDEIIEQISEFSKRVILADANLDKVLSAYNKHRDKPIREQAENIIHLFTLTNLGAPAAFKYFDTTIDRKRYTSTKEVLDATLIHQSITGLYETRIDLSQLGGD

SEQ ID NO: 1348 - protein, 1554 aa, Artificial Sequence
  Description of Artificial Sequence: Synthetic polypeptide
MDKKYSIGLAIGTNSVGWAVITDEYKVPSKKFKVLGNTDRHSIKKNLIGALLFDSGETAEATRLKRTARRRYTRRKNRICYLQEIFSNEMAKVDDSFFHRLEESFLVEEDKKHERHPIFGNIVDEVAYHEKYPTIYHLRKKLVDSTDKADLRLIYLALAHMIKFRGHFLIEGDLNPDNSDVDKLFIQLVQTYNQLFEENPINASGVDAKAILSARLSKSRRLENLIAQLPGEKKNGLFGNLIALSLGLTPNFKSNFDLAEDAKLQLSKDTYDDDLDNLLAQIGDQYADLFLAAKNLSDAILLSDILRVNTEITKAPLSASMIKRYDEHHQDLTLLKALVRQQLPEKYKEIFFDQSKNGYAGYIDGGASQEEFYKFIKPILEKMDGTEELLVKLNREDLLRKQRTFDNGSIPHQIHLGELHAILRRQEDFYPFLKDNREKIEKILTFRIPYYVGPLARGNSRFAWMTRKSEETITPWNFEEVVDKGASAQSFIERMTNFDKNLPNEKVLPKHSLLYEYFTVYNELTKVKYVTEGMRKPAFLSGEQKKAIVDLLFKTNRKVTVKQLKEDYFKKIECFDSVEISGVEDRFNASLGTYHDLLKIIKDKDFLDNEENEDILEDIVLTLTLFEDREMIEERLKTYAHLFDDKVMKQLKRRRYTGWGRLSRKLINGIRDKQSGKTILDFLKSDGFANRNFMQLIHDDSLTFKEDIQKAQVSGQGDSLHEHIANLAGSPAIKKGILQTVKVVDELVKVMGRHKPENIVIEMARENQTTQKGQKNSRERMKRIEEGIKELGSQILKEHPVENTQLQNEKLYLYYLQNGRDMYVDQELDINRLSDYDVDHIVPQSFLKDDSIDNKVLTRSDKNRGKSDNVPSEEVVKKMKNYWRQLLNAKLITQRKFDNLTKAERGGLSELDKAGFIKRQLVETRQITKHVAQILDSRMNTKYDENDKLIREVKVITLKSKLVSDFRKDFQFYKVREINNYHHAHDAYLNAVVGTALIKKYPKLESEFVYGDYKVYDVRKMIAKSEQEIGKATAKYFFYSNIMNFFKTEITLANGEIRKRPLIETNGETGEIVWDKGRDFATVRKVLSMPQVNIVKKTEVQTGGFSKESILPKRNSDKLIARKKDWDPKKYGGFDSPTVAYSVLVVAKVEKGKSKKLKSVKELLGITIMERSSFEKNPIDFLEAKGYKEVKKDLIIKLPKYSLFELENGRKRMLASAGELQKGNELALPSKYVNFLYLASHYEKLKGSMNHRVEITEGILADECAALLCYFFRMPRQVFNAQKKAQSSTDGSSGSETPGTSESATPESSGSEVEFSHEYWMRHALTLAKRARDEREVPVGAVLVLNNRVIGEGWNRAIGLHDPTAHAEIMALRQGGLVMQNYRLIDATLYVTFEPCVMCAGAMIHSRIGRVVFGVRNAKTGAAGSLMDVLHYPGPEDNEQKQLFVEQHKHYLDEIIEQISEFSKRVILADANLDKVLSAYNKHRDKPIREQAENIIHLFTLTNLGAPAAFKYFDTTIDRKRYTSTKEVLDATLIHQSITGLYETRIDLSQLGGD

SEQ ID NO: 1349 - protein, 1554 aa, Artificial Sequence
  Description of Artificial Sequence: Synthetic polypeptide
MDKKYSIGLAIGTNSVGWAVITDEYKVPSKKFKVLGNTDRHSIKKNLIGALLFDSGETAEATRLKRTARRRYTRRKNRICYLQEIFSNEMAKVDDSFFHRLEESFLVEEDKKHERHPIFGNIVDEVAYHEKYPTIYHLRKKLVDSTDKADLRLIYLALAHMIKFRGHFLIEGDLNPDNSDVDKLFIQLVQTYNQLFEENPINASGVDAKAILSARLSKSRRLENLIAQLPGEKKNGLFGNLIALSLGLTPNFKSNFDLAEDAKLQLSKDTYDDDLDNLLAQIGDQYADLFLAAKNLSDAILLSDILRVNTEITKAPLSASMIKRYDEHHQDLTLLKALVRQQLPEKYKEIFFDQSKNGYAGYIDGGASQEEFYKFIKPILEKMDGTEELLVKLNREDLLRKQRTFDNGSIPHQIHLGELHAILRRQEDFYPFLKDNREKIEKILTFRIPYYVGPLARGNSRFAWMTRKSEETITPWNFEEVVDKGASAQSFIERMTNFDKNLPNEKVLPKHSLLYEYFTVYNELTKVKYVTEGMRKPAFLSGEQKKAIVDLLFKTNRKVTVKQLKEDYFKKIECFDSVEISGVEDRFNASLGTYHDLLKIIKDKDFLDNEENEDILEDIVLTLTLFEDREMIEERLKTYAHLFDDKVMKQLKRRRYTGWGRLSRKLINGIRDKQSGKTILDFLKSDGFANRNFMQLIHDDSLTFKEDIQKAQVSGQGDSLHEHIANLAGSPAIKKGILQTVKVVDELVKVMGRHKPENIVIEMARENQTTQKGQKNSRERMKRIEEGIKELGSQILKEHPVENTQLQNEKLYLYYLQNGRDMYVDQELDINRLSDYDVDHIVPQSFLKDDSIDNKVLTRSDKNRGKSDNVPSEEVVKKMKNYWRQLLNAKLITQRKFDNLTKAERGGLSELDKAGFIKRQLVETRQITKHVAQILDSRMNTKYDENDKLIREVKVITLKSKLVSDFRKDFQFYKVREINNYHHAHDAYLNAVVGTALIKKYPKLESEFVYGDYKVYDVRKMIAKSEQEIGKATAKYFFYSNIMNFFKTEITLAMNHRVEITEGILADECAALLCYFFRMPRQVFNAQKKAQSSTDGSSGSETPGTSESATPESSGSEVEFSHEYWMRHALTLAKRARDEREVPVGAVLVLNNRVIGEGWNRAIGLHDPTAHAEIMALRQGGLVMQNYRLIDATLYVTFEPCVMCAGAMIHSRIGRVVFGVRNAKTGAAGSLMDVLHYPGNGEIRKRPLIETNGETGEIVWDKGRDFATVRKVLSMPQVNIVKKTEVQTGGFSKESILPKRNSDKLIARKKDWDPKKYGGFDSPTVAYSVLVVAKVEKGKSKKLKSVKELLGITIMERSSFEKNPIDFLEAKGYKEVKKDLIIKLPKYSLFELENGRKRMLASAGELQKGNELALPSKYVNFLYLASHYEKLKGSPEDNEQKQLFVEQHKHYLDEIIEQISEFSKRVILADANLDKVLSAYNKHRDKPIREQAENIIHLFTLTNLGAPAAFKYFDTTIDRKRYTSTKEVLDATLIHQSITGLYETRIDLSQLGGD

SEQ ID NO: 1350 - protein, 1554 aa, Artificial Sequence
  Description of Artificial Sequence: Synthetic polypeptide
MDKKYSIGLAIGTNSVGWAVITDEYKVPSKKFKVLGNTDRHSIKKNLIGALLFDSGETAEATRLKRTARRRYTRRKNRICYLQEIFSNEMAKVDDSFFHRLEESFLVEEDKKHERHPIFGNIVDEVAYHEKYPTIYHLRKKLVDSTDKADLRLIYLALAHMIKFRGHFLIEGDLNPDNSDVDKLFIQLVQTYNQLFEENPINASGVDAKAILSARLSKSRRLENLIAQLPGEKKNGLFGNLIALSLGLTPNFKSNFDLAEDAKLQLSKDTYDDDLDNLLAQIGDQYADLFLAAKNLSDAILLSDILRVNTEITKAPLSASMIKRYDEHHQDLTLLKALVRQQLPEKYKEIFFDQSKNGYAGYIDGGASQEEFYKFIKPILEKMDGTEELLVKLNREDLLRKQRTFDNGSIPHQIHLGELHAILRRQEDFYPFLKDNREKIEKILTFRIPYYVGPLARGNSRFAWMTRKSEETITPWNFEEVVDKGASAQSFIERMTNFDKNLPNEKVLPKHSLLYEYFTVYNELTKVKYVTEGMRKPAFLSGEQKKAIVDLLFKTNRKVTVKQLKEDYFKKIECFDSVEISGVEDRFNASLGTYHDLLKIIKDKDFLDNEENEDILEDIVLTLTLFEDREMIEERLKTYAHLFDDKVMKQLKRRRYTGWGRLSRKLINGIRDKQSGKTILDFLKSDGFANRNFMQLIHDDSLTFKEDIQKAQVSGQGDSLHEHIANLAGSPAIKKGILQTVKVVDELVKVMGRHKPENIVIEMARENQTTQKGQKNSRERMKRIEEGIKELGSQILKEHPVENTQLQNEKLYLYYLQNGRDMYVDQELDINRLSDYDVDHIVPQSFLKDDSIDNKVLTRSDKNRGKSDNVPSEEVVKKMKNYWRQLLNAKLITQRKFDNLTKAERGGLSELDKAGFIKRQLVETRQITKHVAQILDSRMNTKYDENDKLIREVKVITLKSKLVSDFRKDFQFYKVREINNYHHAHDAYLNAVVGTALIKKYPKLESEFVYGDYKVYDVRKMIAKSEQEIGKATAKYFFYSMNHRVEITEGILADECAALLCYFFRMPRQVFNAQKKAQSSTDGSSGSETPGTSESATPESSGSEVEFSHEYWMRHALTLAKRARDEREVPVGAVLVLNNRVIGEGWNRAIGLHDPTAHAEIMALRQGGLVMQNYRLIDATLYVTFEPCVMCAGAMIHSRIGRVVFGVRNAKTGAAGSLMDVLHYPGNIMNFFKTEITLANGEIRKRPLIETNGETGEIVWDKGRDFATVRKVLSMPQVNIVKKTEVQTGGFSKESILPKRNSDKLIARKKDWDPKKYGGFDSPTVAYSVLVVAKVEKGKSKKLKSVKELLGITIMERSSFEKNPIDFLEAKGYKEVKKDLIIKLPKYSLFELENGRKRMLASAGELQKGNELALPSKYVNFLYLASHYEKLKGSPEDNEQKQLFVEQHKHYLDEIIEQISEFSKRVILADANLDKVLSAYNKHRDKPIREQAENIIHLFTLTNLGAPAAFKYFDTTIDRKRYTSTKEVLDATLIHQSITGLYETRIDLSQLGGD

SEQ ID NO: 1351 - protein, 1554 aa, Artificial Sequence
  Description of Artificial Sequence: Synthetic polypeptide
MDKKYSIGLAIGTNSVGWAVITDEYKVPSKKFKVLGNTDRHSIKKNLIGALLFDSGETAEATRLKRTARRRYTRRKNRICYLQEIFSNEMAKVDDSFFHRLEESFLVEEDKKHERHPIFGNIVDEVAYHEKYPTIYHLRKKLVDSTDKADLRLIYLALAHMIKFRGHFLIEGDLNPDNSDVDKLFIQLVQTYNQLFEENPINASGVDAKAILSARLSKSRRLENLIAQLPGEKKNGLFGNLIALSLGLTPNFKSNFDLAEDAKLQLSKDTYDDDLDNLLAQIGDQYADLFLAAKNLSDAILLSDILRVNTEITKAPLSASMIKRYDEHHQDLTLLKALVRQQLPEKYKEIFFDQSKNGYAGYIDGGASQEEFYKFIKPILEKMDGTEELLVKLNREDLLRKQRTFDNGSIPHQIHLGELHAILRRQEDFYPFLKDNREKIEKILTFRIPYYVGPLARGNSRFAWMTRKSEETITPWNFEEVVDKGASAQSFIERMTNFDKNLPNEKVLPKHSLLYEYFTVYNELTKVKYVTEGMRKPAFLSGEQKKAIVDLLFKTNRKVTVKQLKEDYFKKIECFDSVEISGVEDRFNASLGTYHDLLKIIKDKDFLDNEENEDILEDIVLTLTLFEDREMIEERLKTYAHLFDDKVMKQLKRRRYTGWGRLSRKLINGIRDKQSGKTILDFLKSDGFANRNFMQLIHDDSLTFKEDIQKAQVSGQGDSLHEHIANLAGSPAIKKGILQTVKVVDELVKVMGRHKPENIVIEMARENQTTQKGQKNSRERMKRIEEGIKELGSQILKEHPVENTQLQNEKLYLYYLQNGRDMYVDQELDINRLSDYDVDHIVPQSFLKDDSIDNKVLTRSDKNRGKSDNVPSEEVVKKMKNYWRQLLNAKLITQRKFDNLTKAERGGLSELDKAGFIKRQLVETRQITKHVAQILDSRMNTKYDENDKLIREVKVITLKSKLVSDFRKDFQFYKVREINNYHHAHDAYLNAVVGTALIKKYPKLESEFVYGDYKVYDVRKMIAKSEQEIGKATAKYFFYSNIMNFFKTEITLANGEIRKRPLIETNGETGEIVWDKGRDFATVRKVLSMPQVNIVKKTEVQTGGFSKESILPKRNSDKLIARKKDWDPKKYGGFDSPTVAYSVLVVAKVEKGKSKKLKSVKELLGITIMERSSFEKNPIDFLEAKGYKEVKKDLIIKLPKYSLFELENGRKRMLASAGELQKGNELALPSKYVNFLYLASHYEKLKGSPEDNEQKQLFVEQHKHYLDEIIEQISEFSKRVILADANLDKVLSAYNKHRMNHRVEITEGILADECAALLCYFFRMPRQVFNAQKKAQSSTDGSSGSETPGTSESATPESSGSEVEFSHEYWMRHALTLAKRARDEREVPVGAVLVLNNRVIGEGWNRAIGLHDPTAHAEIMALRQGGLVMQNYRLIDATLYVTFEPCVMCAGAMIHSRIGRVVFGVRNAKTGAAGSLMDVLHYPGDKPIREQAENIIHLFTLTNLGAPAAFKYFDTTIDRKRYTSTKEVLDATLIHQSITGLYETRIDLSQLGGD

SEQ ID NO: 1352 - protein, 1454 aa, Artificial Sequence
  Description of Artificial Sequence: Synthetic polypeptide
MDKKYSIGLAIGTNSVGWAVITDEYKVPSKKFKVLGNTDRHSIKKNLIGALLFDSGETAEATRLKRTARRRYTRRKNRICYLQEIFSNEMAKVDDSFFHRLEESFLVEEDKKHERHPIFGNIVDEVAYHEKYPTIYHLRKKLVDSTDKADLRLIYLALAHMIKFRGHFLIEGDLNPDNSDVDKLFIQLVQTYNQLFEENPINASGVDAKAILSARLSKSRRLENLIAQLPGEKKNGLFGNLIALSLGLTPNFKSNFDLAEDAKLQLSKDTYDDDLDNLLAQIGDQYADLFLAAKNLSDAILLSDILRVNTEITKAPLSASMIKRYDEHHQDLTLLKALVRQQLPEKYKEIFFDQSKNGYAGYIDGGASQEEFYKFIKPILEKMDGTEELLVKLNREDLLRKQRTFDNGSIPHQIHLGELHAILRRQEDFYPFLKDNREKIEKILTFRIPYYVGPLARGNSRFAWMTRKSEETITPWNFEEVVDKGASAQSFIERMTNFDKNLPNEKVLPKHSLLYEYFTVYNELTKVKYVTEGMRKPAFLSGEQKKAIVDLLFKTNRKVTVKQLKEDYFKKIECFDSVEISGVEDRFNASLGTYHDLLKIIKDKDFLDNEENEDILEDIVLTLTLFEDREMIEERLKTYAHLFDDKVMKQLKRRRYTGWGRLSRKLINGIRDKQSGKTILDFLKSDGFANRNFMQLIHDDSLTFKEDIQKAQVSGQGDSLHEHIANLAGSPAIKKGILQTVKVVDELVKVMGRHKPENIVIEMARENQTTQKGQKNSRERMKRIEEGIKELGSEVEFSHEYWMRHALTLAKRARDEREVPVGAVLVLNNRVIGEGWNRAIGLHDPTAHAEIMALRQGGLVMQNYRLIDATLYVTFEPCVMCAGAMIHSRIGRVVFGVRNAKTGAAGSLMDVLHYPGMNHRVEITEGILADECAALLCYFFRMPRQVFNAQKKAQSSTDEEVVKKMKNYWRQLLNAKLITQRKFDNLTKAERGGLSELDKAGFIKRQLVETRQITKHVAQILDSRMNTKYDENDKLIREVKVITLKSKLVSDFRKDFQFYKVREINNYHHAHDAYLNAVVGTALIKKYPKLESEFVYGDYKVYDVRKMIAKSEQEIGKATAKYFFYSNIMNFFKTEITLANGEIRKRPLIETNGETGEIVWDKGRDFATVRKVLSMPQVNIVKKTEVQTGGFSKESILPKRNSDKLIARKKDWDPKKYGGFDSPTVAYSVLVVAKVEKGKSKKLKSVKELLGITIMERSSFEKNPIDFLEAKGYKEVKKDLIIKLPKYSLFELENGRKRMLASAGELQKGNELALPSKYVNFLYLASHYEKLKGSPEDNEQKQLFVEQHKHYLDEIIEQISEFSKRVILADANLDKVLSAYNKHRDKPIREQAENIIHLFTLTNLGAPAAFKYFDTTIDRKRYTSTKEVLDATLIHQSITGLYETRIDLSQLGGD

SEQ ID NO: 1353 - protein, 1420 aa, Artificial Sequence
  Description of Artificial Sequence: Synthetic polypeptide
MDKKYSIGLAIGTNSVGWAVITDEYKVPSKKFKVLGNTDRHSIKKNLIGALLFDSGETAEATRLKRTARRRYTRRKNRICYLQEIFSNEMAKVDDSFFHRLEESFLVEEDKKHERHPIFGNIVDEVAYHEKYPTIYHLRKKLVDSTDKADLRLIYLALAHMIKFRGHFLIEGDLNPDNSDVDKLFIQLVQTYNQLFEENPINASGVDAKAILSARLSKSRRLENLIAQLPGEKKNGLFGNLIALSLGLTPNFKSNFDLAEDAKLQLSKDTYDDDLDNLLAQIGDQYADLFLAAKNLSDAILLSDILRVNTEITKAPLSASMIKRYDEHHQDLTLLKALVRQQLPEKYKEIFFDQSKNGYAGYIDGGASQEEFYKFIKPILEKMDGTEELLVKLNREDLLRKQRTFDNGSIPHQIHLGELHAILRRQEDFYPFLKDNREKIEKILTFRIPYYVGPLARGNSRFAWMTRKSEETITPWNFEEVVDKGASAQSFIERMTNFDKNLPNEKVLPKHSLLYEYFTVYNELTKVKYVTEGMRKPAFLSGEQKKAIVDLLFKTNRKVTVKQLKEDYFKKIECFDSVEISGVEDRFNASLGTYHDLLKIIKDKDFLDNEENEDILEDIVLTLTLFEDREMIEERLKTYAHLFDDKVMKQLKRRRYTGWGRLSRKLINGIRDKQSGKTILDFLKSDGFANRNFMQLIHDDSLTFKEDIQKAQVSGQGDSLHEHIANLAGSPAIKKGILQTVKVVDELVKVMGRHKPENIVIEMARENQTTQKGQKNSRERMKRIEEGIKELGSEVEFSHEYWMRHALTLAKRARDEREVPVGAVLVLNNRVIGEGWNRAIGLHDPTAHAEIMALRQGGLVMQNYRLIDATLYVTFEPCVMCAGAMIHSRIGRVVFGVRNAKTGAAGSLMDVLHYPGMNHRVEITEGILADECAALLCYFFRMPRQVFNAQKKAQSSTDGLSELDKAGFIKRQLVETRQITKHVAQILDSRMNTKYDENDKLIREVKVITLKSKLVSDFRKDFQFYKVREINNYHHAHDAYLNAVVGTALIKKYPKLESEFVYGDYKVYDVRKMIAKSEQEIGKATAKYFFYSNIMNFFKTEITLANGEIRKRPLIETNGETGEIVWDKGRDFATVRKVLSMPQVNIVKKTEVQTGGFSKESILPKRNSDKLIARKKDWDPKKYGGFDSPTVAYSVLVVAKVEKGKSKKLKSVKELLGITIMERSSFEKNPIDFLEAKGYKEVKKDLIIKLPKYSLFELENGRKRMLASAGELQKGNELALPSKYVNFLYLASHYEKLKGSPEDNEQKQLFVEQHKHYLDEIIEQISEFSKRVILADANLDKVLSAYNKHRDKPIREQAENIIHLFTLTNLGAPAAFKYFDTTIDRKRYTSTKEVLDATLIHQSITGLYETRIDLSQLGGD

SEQ ID NO: 1354 - protein, 1554 aa, Artificial Sequence
  Description of Artificial Sequence: Synthetic polypeptide
MDKKYSIGLAIGTNSVGWAVITDEYKVPSKKFKVLGNTDRHSIKKNLIGALLFDSGETAEATRLKRTARRRYTRRKNRICYLQEIFSNEMAKVDDSFFHRLEESFLVEEDKKHERHPIFGNIVDEVAYHEKYPTIYHLRKKLVDSTDKADLRLIYLALAHMIKFRGHFLIEGDLNPDNSDVDKLFIQLVQTYNQLFEENPINASGVDAKAILSARLSKSRRLENLIAQLPGEKKNGLFGNLIALSLGLTPNFKSNFDLAEDAKLQLSKDTYDDDLDNLLAQIGDQYADLFLAAKNLSDAILLSDILRVNTEITKAPLSASMIKRYDEHHQDLTLLKALVRQQLPEKYKEIFFDQSKNGYAGYIDGGASQEEFYKFIKPILEKMDGTEELLVKLNREDLLRKQRTFDNGSIPHQIHLGELHAILRRQEDFYPFLKDNREKIEKILTFRIPYYVGPLARGNSRFAWMTRKSEETITPWNFEEVVDKGASAQSFIERMTNFDKNLPNEKVLPKHSLLYEYFTVYNELTKVKYVTEGMRKPAFLSGEQKKAIVDLLFKTNRKVTVKQLKEDYFKKIECFDSVEISGVEDRFNASLGTYHDLLKIIKDKDFLDNEENEDILEDIVLTLTLFEDREMIEERLKTYAHLFDDKVMKQLKRRRYTGWGRLSRKLINGIRDKQSGKTILDFLKSDGFANRNFMQLIHDDSLTFKEDIQKAQVSGQGDSLHEHIANLAGSPAIKKGILQTVKVVDELVKVMGRHKPENIVIEMARENQTTQKGQKNSRERMKRIEEGIKELGSQILKEHPVENTQLQNEKLYLYYLQNGRDMYVDQELDINRLSDYDVDHIVPQSFLKDDSIDNKVLTRSDKNRGKSDNVPSEEVVKKMKNYWRQLLNAKLITQRKFDNLTKAERGGLSELDKAGFIKRQLVETRQITKHVAQILDSRMNTKYDENDKLIREVKVITLKSKLVSDFRKDFQFYKVREINNYHHAHDAYLNAVVGTALIKKYPKTAHAEIMALRQGGLVMQNYRLIDATLYVTFEPCVMCAGAMIHSRIGRVVFGVRNAKTGAAGSLMDVLHYPGMNHRVEITEGILADECAALLCYFFRMPRQVFNAQKKAQSSTDGSSGSETPGTSESATPESSGSEVEFSHEYWMRHALTLAKRARDEREVPVGAVLVLNNRVIGEGWNRAIGLHDPLESEFVYGDYKVYDVRKMIAKSEQEIGKATAKYFFYSNIMNFFKTEITLANGEIRKRPLIETNGETGEIVWDKGRDFATVRKVLSMPQVNIVKKTEVQTGGFSKESILPKRNSDKLIARKKDWDPKKYGGFDSPTVAYSVLVVAKVEKGKSKKLKSVKELLGITIMERSSFEKNPIDFLEAKGYKEVKKDLIIKLPKYSLFELENGRKRMLASAGELQKGNELALPSKYVNFLYLASHYEKLKGSPEDNEQKQLFVEQHKHYLDEIIEQISEFSKRVILADANLDKVLSAYNKHRDKPIREQAENIIHLFTLTNLGAPAAFKYFDTTIDRKRYTSTKEVLDATLIHQSITGLYETRIDLSQLGGD

SEQ ID NO: 1355 - protein, 1554 aa, Artificial Sequence
  Description of Artificial Sequence: Synthetic polypeptide
MDKKYSIGLAIGTNSVGWAVITDEYKVPSKKFKVLGNTDRHSIKKNLIGALLFDSGETAEATRLKRTARRRYTRRKNRICYLQEIFSNEMAKVDDSFFHRLEESFLVEEDKKHERHPIFGNIVDEVAYHEKYPTIYHLRKKLVDSTDKADLRLIYLALAHMIKFRGHFLIEGDLNPDNSDVDKLFIQLVQTYNQLFEENPINASGVDAKAILSARLSKSRRLENLIAQLPGEKKNGLFGNLIALSLGLTPNFKSNFDLAEDAKLQLSKDTYDDDLDNLLAQIGDQYADLFLAAKNLSDAILLSDILRVNTEITKAPLSASMIKRYDEHHQDLTLLKALVRQQLPEKYKEIFFDQSKNGYAGYIDGGASQEEFYKFIKPILEKMDGTEELLVKLNREDLLRKQRTFDNGSIPHQIHLGELHAILRRQEDFYPFLKDNREKIEKILTFRIPYYVGPLARGNSRFAWMTRKSEETITPWNFEEVVDKGASAQSFIERMTNFDKNLPNEKVLPKHSLLYEYFTVYNELTKVKYVTEGMRKPAFLSGEQKKAIVDLLFKTNRKVTVKQLKEDYFKKIECFDSVEISGVEDRFNASLGTYHDLLKIIKDKDFLDNEENEDILEDIVLTLTLFEDREMIEERLKTYAHLFDDKVMKQLKRRRYTGWGRLSRKLINGIRDKQSGKTILDFLKSDGFANRNFMQLIHDDSLTFKEDIQKAQVSGQGDSLHEHIANLAGSPAIKKGILQTVKVVDELVKVMGRHKPENIVIEMARENQTTQKGQKNSRERMKRIEEGIKELGSQILKEHPVENTQLQNEKLYLYYLQNGRDMYVDQELDINRLSDYDVDHIVPQSFLKDDSIDNKVLTRSDKNRGKSDNVPSEEVVKKMKNYWRQLLNAKLITQRKFDNLTKAERGGLSELDKAGFIKRQLVETRQITKHVAQILDSRMNTKYDENDKLIREVKVITLKSKLVSDFRKDFQFYKVREINNYHHAHDAYLNAVVGTALIKKYPKLESEFVYGDYKVTAHAEIMALRQGGLVMQNYRLIDATLYVTFEPCVMCAGAMIHSRIGRVVFGVRNAKTGAAGSLMDVLHYPGMNHRVEITEGILADECAALLCYFFRMPRQVFNAQKKAQSSTDGSSGSETPGTSESATPESSGSEVEFSHEYWMRHALTLAKRARDEREVPVGAVLVLNNRVIGEGWNRAIGLHDPYDVRKMIAKSEQEIGKATAKYFFYSNIMNFFKTEITLANGEIRKRPLIETNGETGEIVWDKGRDFATVRKVLSMPQVNIVKKTEVQTGGFSKESILPKRNSDKLIARKKDWDPKKYGGFDSPTVAYSVLVVAKVEKGKSKKLKSVKELLGITIMERSSFEKNPIDFLEAKGYKEVKKDLIIKLPKYSLFELENGRKRMLASAGELQKGNELALPSKYVNFLYLASHYEKLKGSPEDNEQKQLFVEQHKHYLDEIIEQISEFSKRVILADANLDKVLSAYNKHRDKPIREQAENIIHLFTLTNLGAPAAFKYFDTTIDRKRYTSTKEVLDATLIHQSITGLYETRIDLSQLGGD

SEQ ID NO: 1356 - protein, 1554 aa, Artificial Sequence
  Description of Artificial Sequence: Synthetic polypeptide
MDKKYSIGLAIGTNSVGWAVITDEYKVPSKKFKVLGNTDRHSIKKNLIGALLFDSGETAEATRLKRTARRRYTRRKNRICYLQEIFSNEMAKVDDSFFHRLEESFLVEEDKKHERHPIFGNIVDEVAYHEKYPTIYHLRKKLVDSTDKADLRLIYLALAHMIKFRGHFLIEGDLNPDNSDVDKLFIQLVQTYNQLFEENPINASGVDAKAILSARLSKSRRLENLIAQLPGEKKNGLFGNLIALSLGLTPNFKSNFDLAEDAKLQLSKDTYDDDLDNLLAQIGDQYADLFLAAKNLSDAILLSDILRVNTEITKAPLSASMIKRYDEHHQDLTLLKALVRQQLPEKYKEIFFDQSKNGYAGYIDGGASQEEFYKFIKPILEKMDGTEELLVKLNREDLLRKQRTFDNGSIPHQIHLGELHAILRRQEDFYPFLKDNREKIEKILTFRIPYYVGPLARGNSRFAWMTRKSEETITPWNFEEVVDKGASAQSFIERMTNFDKNLPNEKVLPKHSLLYEYFTVYNELTKVKYVTEGMRKPAFLSGEQKKAIVDLLFKTNRKVTVKQLKEDYFKKIECFDSVEISGVEDRFNASLGTYHDLLKIIKDKDFLDNEENEDILEDIVLTLTLFEDREMIEERLKTYAHLFDDKVMKQLKRRRYTGWGRLSRKLINGIRDKQSGKTILDFLKSDGFANRNFMQLIHDDSLTFKEDIQKAQVSGQGDSLHEHIANLAGSPAIKKGILQTVKVVDELVKVMGRHKPENIVIEMARENQTTQKGQKNSRERMKRIEEGIKELGSQILKEHPVENTQLQNEKLYLYYLQNGRDMYVDQELDINRLSDYDVDHIVPQSFLKDDSIDNKVLTRSDKNRGKSDNVPSEEVVKKMKNYWRQLLNAKLITQRKFDNLTKAERGGLSELDKAGFIKRQLVETRQITKHVAQILDSRMNTKYDENDKLIREVKVITLKSKLVSDFRKDFQFYKVREINNYHHAHDAYLNAVVGTALIKKYPKLESEFVYGDYKVYDVRKMITAHAEIMALRQGGLVMQNYRLIDATLYVTFEPCVMCAGAMIHSRIGRVVFGVRNAKTGAAGSLMDVLHYPGMNHRVEITEGILADECAALLCYFFRMPRQVFNAQKKAQSSTDGSSGSETPGTSESATPESSGSEVEFSHEYWMRHALTLAKRARDEREVPVGAVLVLNNRVIGEGWNRAIGLHDPAKSEQEIGKATAKYFFYSNIMNFFKTEITLANGEIRKRPLIETNGETGEIVWDKGRDFATVRKVLSMPQVNIVKKTEVQTGGFSKESILPKRNSDKLIARKKDWDPKKYGGFDSPTVAYSVLVVAKVEKGKSKKLKSVKELLGITIMERSSFEKNPIDFLEAKGYKEVKKDLIIKLPKYSLFELENGRKRMLASAGELQKGNELALPSKYVNFLYLASHYEKLKGSPEDNEQKQLFVEQHKHYLDEIIEQISEFSKRVILADANLDKVLSAYNKHRDKPIREQAENIIHLFTLTNLGAPAAFKYFDTTIDRKRYTSTKEVLDATLIHQSITGLYETRIDLSQLGGD

SEQ ID NO: 1357 - protein, 1554 aa, Artificial Sequence
  Description of Artificial Sequence: Synthetic polypeptide
MDKKYSIGLAIGTNSVGWAVITDEYKVPSKKFKVLGNTDRHSIKKNLIGALLFDSGETAEATRLKRTARRRYTRRKNRICYLQEIFSNEMAKVDDSFFHRLEESFLVEEDKKHERHPIFGNIVDEVAYHEKYPTIYHLRKKLVDSTDKADLRLIYLALAHMIKFRGHFLIEGDLNPDNSDVDKLFIQLVQTYNQLFEENPINASGVDAKAILSARLSKSRRLENLIAQLPGEKKNGLFGNLIALSLGLTPNFKSNFDLAEDAKLQLSKDTYDDDLDNLLAQIGDQYADLFLAAKNLSDAILLSDILRVNTEITKAPLSASMIKRYDEHHQDLTLLKALVRQQLPEKYKEIFFDQSKNGYAGYIDGGASQEEFYKFIKPILEKMDGTEELLVKLNREDLLRKQRTFDNGSIPHQIHLGELHAILRRQEDFYPFLKDNREKIEKILTFRIPYYVGPLARGNSRFAWMTRKSEETITPWNFEEVVDKGASAQSFIERMTNFDKNLPNEKVLPKHSLLYEYFTVYNELTKVKYVTEGMRKPAFLSGEQKKAIVDLLFKTNRKVTVKQLKEDYFKKIECFDSVEISGVEDRFNASLGTYHDLLKIIKDKDFLDNEENEDILEDIVLTLTLFEDREMIEERLKTYAHLFDDKVMKQLKRRRYTGWGRLSRKLINGIRDKQSGKTILDFLKSDGFANRNFMQLIHDDSLTFKEDIQKAQVSGQGDSLHEHIANLAGSPAIKKGILQTVKVVDELVKVMGRHKPENIVIEMARENQTTQKGQKNSRERMKRIEEGIKELGSQILKEHPVENTQLQNEKLYLYYLQNGRDMYVDQELDINRLSDYDVDHIVPQSFLKDDSIDNKVLTRSDKNRGKSDNVPSEEVVKKMKNYWRQLLNAKLITQRKFDNLTKAERGGLSELDKAGFIKRQLVETRQITKHVAQILDSRMNTKYDENDKLIREVKVITLKSKLVSDFRKDFQFYKVREINNYHHAHDAYLNAVVGTALIKKYPKLESEFVYGDYKVYDVRKMIAKSEQEITAHAEIMALRQGGLVMQNYRLIDATLYVTFEPCVMCAGAMIHSRIGRVVFGVRNAKTGAAGSLMDVLHYPGMNHRVEITEGILADECAALLCYFFRMPRQVFNAQKKAQSSTDGSSGSETPGTSESATPESSGSEVEFSHEYWMRHALTLAKRARDEREVPVGAVLVLNNRVIGEGWNRAIGLHDPGKATAKYFFYSNIMNFFKTEITLANGEIRKRPLIETNGETGEIVWDKGRDFATVRKVLSMPQVNIVKKTEVQTGGFSKESILPKRNSDKLIARKKDWDPKKYGGFDSPTVAYSVLVVAKVEKGKSKKLKSVKELLGITIMERSSFEKNPIDFLEAKGYKEVKKDLIIKLPKYSLFELENGRKRMLASAGELQKGNELALPSKYVNFLYLASHYEKLKGSPEDNEQKQLFVEQHKHYLDEIIEQISEFSKRVILADANLDKVLSAYNKHRDKPIREQAENIIHLFTLTNLGAPAAFKYFDTTIDRKRYTSTKEVLDATLIHQSITGLYETRIDLSQLGGD

SEQ ID NO: 1358 - protein, 1554 aa, Artificial Sequence
  Description of Artificial Sequence: Synthetic polypeptide
MDKKYSIGLAIGTNSVGWAVITDEYKVPSKKFKVLGNTDRHSIKKNLIGALLFDSGETAEATRLKRTARRRYTRRKNRICYLQEIFSNEMAKVDDSFFHRLEESFLVEEDKKHERHPIFGNIVDEVAYHEKYPTIYHLRKKLVDSTDKADLRLIYLALAHMIKFRGHFLIEGDLNPDNSDVDKLFIQLVQTYNQLFEENPINASGVDAKAILSARLSKSRRLENLIAQLPGEKKNGLFGNLIALSLGLTPNFKSNFDLAEDAKLQLSKDTYDDDLDNLLAQIGDQYADLFLAAKNLSDAILLSDILRVNTEITKAPLSASMIKRYDEHHQDLTLLKALVRQQLPEKYKEIFFDQSKNGYAGYIDGGASQEEFYKFIKPILEKMDGTEELLVKLNREDLLRKQRTFDNGSIPHQIHLGELHAILRRQEDFYPFLKDNREKIEKILTFRIPYYVGPLARGNSRFAWMTRKSEETITPWNFEEVVDKGASAQSFIERMTNFDKNLPNEKVLPKHSLLYEYFTVYNELTKVKYVTEGMRKPAFLSGEQKKAIVDLLFKTNRKVTVKQLKEDYFKKIECFDSVEISGVEDRFNASLGTYHDLLKIIKDKDFLDNEENEDILEDIVLTLTLFEDREMIEERLKTYAHLFDDKVMKQLKRRRYTGWGRLSRKLINGIRDKQSGKTILDFLKSDGFANRNFMQLIHDDSLTFKEDIQKAQVSGQGDSLHEHIANLAGSPAIKKGILQTVKVVDELVKVMGRHKPENIVIEMARENQTTQKGQKNSRERMKRIEEGIKELGSQILKEHPVENTQLQNEKLYLYYLQNGRDMYVDQELDINRLSDYDVDHIVPQSFLKDDSIDNKVLTRSDKNRGKSDNVPSEEVVKKMKNYWRQLLNAKLITQRKFDNLTKAERGGLSELDKAGFIKRQLVETRQITKHVAQILDSRMNTKYDENDKLIREVKVITLKSKLVSDFRKDFQFYKVREINNYHHAHDAYLNAVVGTALIKKYPKLESEFVYGDYKVYDVRKMIAKSEQEIGKATAKYFFYSTAHAEIMALRQGGLVMQNYRLIDATLYVTFEPCVMCAGAMIHSRIGRVVFGVRNAKTGAAGSLMDVLHYPGMNHRVEITEGILADECAALLCYFFRMPRQVFNAQKKAQSSTDGSSGSETPGTSESATPESSGSEVEFSHEYWMRHALTLAKRARDEREVPVGAVLVLNNRVIGEGWNRAIGLHDPNIMNFFKTEITLANGEIRKRPLIETNGETGEIVWDKGRDFATVRKVLSMPQVNIVKKTEVQTGGFSKESILPKRNSDKLIARKKDWDPKKYGGFDSPTVAYSVLVVAKVEKGKSKKLKSVKELLGITIMERSSFEKNPIDFLEAKGYKEVKKDLIIKLPKYSLFELENGRKRMLASAGELQKGNELALPSKYVNFLYLASHYEKLKGSPEDNEQKQLFVEQHKHYLDEIIEQISEFSKRVILADANLDKVLSAYNKHRDKPIREQAENIIHLFTLTNLGAPAAFKYFDTTIDRKRYTSTKEVLDATLIHQSITGLYETRIDLSQLGGD

SEQ ID NO: 1359 - protein, 1554 aa, Artificial Sequence
  Description of Artificial Sequence: Synthetic polypeptide
MDKKYSIGLAIGTNSVGWAVITDEYKVPSKKFKVLGNTDRHSIKKNLIGALLFDSGETAEATRLKRTARRRYTRRKNRICYLQEIFSNEMAKVDDSFFHRLEESFLVEEDKKHERHPIFGNIVDEVAYHEKYPTIYHLRKKLVDSTDKADLRLIYLALAHMIKFRGHFLIEGDLNPDNSDVDKLFIQLVQTYNQLFEENPINASGVDAKAILSARLSKSRRLENLIAQLPGEKKNGLFGNLIALSLGLTPNFKSNFDLAEDAKLQLSKDTYDDDLDNLLAQIGDQYADLFLAAKNLSDAILLSDILRVNTEITKAPLSASMIKRYDEHHQDLTLLKALVRQQLPEKYKEIFFDQSKNGYAGYIDGGASQEEFYKFIKPILEKMDGTEELLVKLNREDLLRKQRTFDNGSIPHQIHLGELHAILRRQEDFYPFLKDNREKIEKILTFRIPYYVGPLARGNSRFAWMTRKSEETITPWNFEEVVDKGASAQSFIERMTNFDKNLPNEKVLPKHSLLYEYFTVYNELTKVKYVTEGMRKPAFLSGEQKKAIVDLLFKTNRKVTVKQLKEDYFKKIECFDSVEISGVEDRFNASLGTYHDLLKIIKDKDFLDNEENEDILEDIVLTLTLFEDREMIEERLKTYAHLFDDKVMKQLKRRRYTGWGRLSRKLINGIRDKQSGKTILDFLKSDGFANRNFMQLIHDDSLTFKEDIQKAQVSGQGDSLHEHIANLAGSPAIKKGILQTVKVVDELVKVMGRHKPENIVIEMARENQTTQKGQKNSRERMKRIEEGIKELGSQILKEHPVENTQLQNEKLYLYYLQNGRDMYVDQELDINRLSDYDVDHIVPQSFLKDDSIDNKVLTRSDKNRGKSDNVPSEEVVKKMKNYWRQLLNAKLITQRKFDNLTKAERGGLSELDKAGFIKRQLVETRQITKHVAQILDSRMNTKYDENDKLIREVKVITLKSKLVSDFRKDFQFYKVREINNYHHAHDAYLNAVVGTALIKKYPKLESEFVYGDYKVYDVRKMIAKSEQEIGKATAKYFFYSNIMNFFKTEITLANTAHAEIMALRQGGLVMQNYRLIDATLYVTFEPCVMCAGAMIHSRIGRVVFGVRNAKTGAAGSLMDVLHYPGMNHRVEITEGILADECAALLCYFFRMPRQVFNAQKKAQSSTDGSSGSETPGTSESATPESSGSEVEFSHEYWMRHALTLAKRARDEREVPVGAVLVLNNRVIGEGWNRAIGLHDPGEIRKRPLIETNGETGEIVWDKGRDFATVRKVLSMPQVNIVKKTEVQTGGFSKESILPKRNSDKLIARKKDWDPKKYGGFDSPTVAYSVLVVAKVEKGKSKKLKSVKELLGITIMERSSFEKNPIDFLEAKGYKEVKKDLIIKLPKYSLFELENGRKRMLASAGELQKGNELALPSKYVNFLYLASHYEKLKGSPEDNEQKQLFVEQHKHYLDEIIEQISEFSKRVILADANLDKVLSAYNKHRDKPIREQAENIIHLFTLTNLGAPAAFKYFDTTIDRKRYTSTKEVLDATLIHQSITGLYETRIDLSQLGGD

SEQ ID NO: 1360 - protein, 1554 aa, Artificial Sequence
  Description of Artificial Sequence: Synthetic polypeptide
MDKKYSIGLAIGTNSVGWAVITDEYKVPSKKFKVLGNTDRHSIKKNLIGALLFDSGETAEATRLKRTARRRYTRRKNRICYLQEIFSNEMAKVDDSFFHRLEESFLVEEDKKHERHPIFGNIVDEVAYHEKYPTIYHLRKKLVDSTDKADLRLIYLALAHMIKFRGHFLIEGDLNPDNSDVDKLFIQLVQTYNQLFEENPINASGVDAKAILSARLSKSRRLENLIAQLPGEKKNGLFGNLIALSLGLTPNFKSNFDLAEDAKLQLSKDTYDDDLDNLLAQIGDQYADLFLAAKNLSDAILLSDILRVNTEITKAPLSASMIKRYDEHHQDLTLLKALVRQQLPEKYKEIFFDQSKNGYAGYIDGGASQEEFYKFIKPILEKMDGTEELLVKLNREDLLRKQRTFDNGSIPHQIHLGELHAILRRQEDFYPFLKDNREKIEKILTFRIPYYVGPLARGNSRFAWMTRKSEETITPWNFEEVVDKGASAQSFIERMTNFDKNLPNEKVLPKHSLLYEYFTVYNELTKVKYVTEGMRKPAFLSGEQKKAIVDLLFKTNRKVTVKQLKEDYFKKIECFDSVEISGVEDRFNASLGTYHDLLKIIKDKDFLDNEENEDILEDIVLTLTLFEDREMIEERLKTYAHLFDDKVMKQLKRRRYTGWGRLSRKLINGIRDKQSGKTILDFLKSDGFANRNFMQLIHDDSLTFKEDIQKAQVSGQGDSLHEHIANLAGSPAIKKGILQTVKVVDELVKVMGRHKPENIVIEMARENQTTQKGQKNSRERMKRIEEGIKELGSQILKEHPVENTQLQNEKLYLYYLQNGRDMYVDQELDINRLSDYDVDHIVPQSFLKDDSIDNKVLTRSDKNRGKSDNVPSEEVVKKMKNYWRQLLNAKLITQRKFDNLTKAERGGLSELDKAGFIKRQLVETRQITKHVAQILDSRMNTKYDENDKLIREVKVITLKSKLVSDFRKDFQFYKVREINNYHHAHDAYLNAVVGTALIKKYPKLESEFVYGDYKVYDVRKMIAKSEQEIGKATAKYFFYSNIMNFFKTEITLANGEIRKRPLIETNGETGEIVWDKGRDFATVRKVLSMPQVNIVKKTEVQTGGFSKESILPKRNSDKLIARKKDWDPKKYGGFDSPTVAYSVLVVAKVEKGKSKKLKSVKELLGITIMERSSFEKNPIDFLEAKGYKEVKKDLIIKLPKYSLFELENGRKRMLASAGELQKGNELALPSKYVNFLYLASHYEKLKGTAHAEIMALRQGGLVMQNYRLIDATLYVTFEPCVMCAGAMIHSRIGRVVFGVRNAKTGAAGSLMDVLHYPGMNHRVEITEGILADECAALLCYFFRMPRQVFNAQKKAQSSTDGSSGSETPGTSESATPESSGSEVEFSHEYWMRHALTLAKRARDEREVPVGAVLVLNNRVIGEGWNRAIGLHDPSPEDNEQKQLFVEQHKHYLDEIIEQISEFSKRVILADANLDKVLSAYNKHRDKPIREQAENIIHLFTLTNLGAPAAFKYFDTTIDRKRYTSTKEVLDATLIHQSITGLYETRIDLSQLGGD

SEQ ID NO: 1361-1362 - skipped (2 entries)

SEQ ID NO: 1363 - protein, 160 aa, Unknown
  Description of Unknown: TadA polypeptide sequence
MGSHMTNDIYFMTLAIEEAKKAAQLGEVPIGAIITKDDEVIARAHNLRETLQQPTAHAEHIAIERAAKVLGSWRLEGCTLYVTLEPCVMCAGTIVMSRIPRVVYGADDPKGGCSGSLMNLLQQSNFNHRAIVDKGVLKEACSTLLTTFFKNLRANKKSTN

SEQ ID NO: 1364 - protein, 161 aa, Unknown
  Description of Unknown: TadA polypeptide sequence
MTQDELYMKEAIKEAKKAEEKGEVPIGAVLVINGEIIARAHNLRETEQRSIAHAEMLVIDEACKALGTWRLEGATLYVTLEPCPMCAGAVVLSRVEKVVFGAFDPKGGCSGTLMNLLQEERFNHQAEVVSGVLEEECGGMLSAFFRELRKKKKAARKNLSE

SEQ ID NO: 1365 - protein, 183 aa, Unknown
  Description of Unknown: TadA polypeptide sequence
MPPAFITGVTSLSDVELDHEYWMRHALTLAKRAWDEREVPVGAVLVHNHRVIGEGWNRPIGRHDPTAHAEIMALRQGGLVLQNYRLLDTTLYVTLEPCVMCAGAMVHSRIGRVVFGARDAKTGAAGSLIDVLHHPGMNHRVEIIEGVLRDECATLLSDFFRMRRQEIKALKKADRAEGAGPAV

SEQ ID NO: 1366 - protein, 164 aa, Unknown
  Description of Unknown: TadA polypeptide sequence
MDEYWMQVAMQMAEKAEAAGEVPVGAVLVKDGQQIATGYNLSISQHDPTAHAEILCLRSAGKKLENYRLLDATLYITLEPCAMCAGAMVHSRIARVVYGARDEKTGAAGTVVNLLQHPAFNHQVEVTSGVLAEACSAQLSRFFKRRRDEKKALKLAQRAQQGIE

SEQ ID NO: 1367 - protein, 173 aa, Unknown
  Description of Unknown: TadA polypeptide sequence
MDAAKVRSEFDEKMMRYALELADKAEALGEIPVGAVLVDDARNIIGEGWNLSIVQSDPTAHAEIIALRNGAKNIQNYRLLNSTLYVTLEPCTMCAGAILHSRIKRLVFGASDYKTGAIGSRFHFFDDYKMNHTLEITSGVLAEECSQKLSTFFQKRREEKKIEKALLKSLSDK

SEQ ID NO: 1368 - protein, 161 aa, Unknown
  Description of Unknown: TadA polypeptide sequence
MRTDESEDQDHRMMRLALDAARAAAEAGETPVGAVILDPSTGEVIATAGNGPIAAHDPTAHAEIAAMRAAAAKLGNYRLTDLTLVVTLEPCAMCAGAISHARIGRVVFGADDPKGGAVVHGPKFFAQPTCHWRPEVTGGVLADESADLLRGFFRARRKAKI

SEQ ID NO: 1369 - protein, 179 aa, Unknown
  Description of Unknown: TadA polypeptide sequence
MSSLKKTPIRDDAYWMGKAIREAAKAAARDEVPIGAVIVRDGAVIGRGHNLREGSNDPSAHAEMIAIRQAARRSANWRLTGATLYVTLEPCLMCMGAIILARLERVVFGCYDPKGGAAGSLYDLSADPRLNHQVRLSPGVCQEECGTMLSDFFRDLRRRKKAKATPALFIDERKVPPEP

SEQ ID NO: 1370 - protein, 167 aa, Escherichia coli; identical to SEQ ID NO: 8

SEQ ID NO: 1371-1372 - skipped (2 entries)

SEQ ID NO: 1373 - protein, 198 aa, Mus musculus
MDSLLMKQKKFLYHFKNVRWAKGRHETYLCYVVKRRDSATSCSLDFGHLRNKSGCHVELLFLRYISDWDLDPGRCYRVTWFTSWSPCYDCARHVAEFLRWNPNLSLRIFTARLYFCEDRKAEPEGLRRLHRAGVQIGIMTFKDYFYCWNTFVENRERTFKAWEGLHENSVRLTRQLRRILLPLYEVDDLRDAFRMLGF

SEQ ID NO: 1374 - protein, 198 aa, Canis lupus familiaris
MDSLLMKQRKFLYHFKNVRWAKGRHETYLCYVVKRRDSATSFSLDFGHLRNKSGCHVELLFLRYISDWDLDPGRCYRVTWFTSWSPCYDCARHVADFLRGYPNLSLRIFAARLYFCEDRKAEPEGLRRLHRAGVQIAIMTFKDYFYCWNTFVENREKTFKAWEGLHENSVRLSRQLRRILLPLYEVDDLRDAFRTLGL

SEQ ID NO: 1375 - protein, 199 aa, Bos taurus
MDSLLKKQRQFLYQFKNVRWAKGRHETYLCYVVKRRDSPTSFSLDFGHLRNKAGCHVELLFLRYISDWDLDPGRCYRVTWFTSWSPCYDCARHVADFLRGYPNLSLRIFTARLYFCDKERKAEPEGLRRLHRAGVQIAIMTFKDYFYCWNTFVENHERTFKAWEGLHENSVRLSRQLRRILLPLYEVDDLRDAFRTLGL

SEQ ID NO: 1376 - protein, 239 aa, Rattus norvegicus
MAVGSKPKAALVGPHWERERIWCFLCSTGLGTQQTGQTSRWLRPAATQDPVSPPRSLLMKQRKFLYHFKNVRWAKGRHETYLCYVVKRRDSATSFSLDFGYLRNKSGCHVELLFLRYISDWDLDPGRCYRVTWFTSWSPCYDCARHVADFLRGNPNLSLRIFTARLTGWGALPAGLMSPARPSDYFYCWNTFVENHERTFKAWEGLHENSVRLSRRLRRILLPLYEVDDLRDAFRTLGL

SEQ ID NO: 1377 - protein, 198 aa, Mus musculus [sequence omitted]

SEQ ID NO: 1378 - protein, 229 aa, Rattus norvegicus [sequence omitted]

SEQ ID NO: 1379 - protein, 229 aa, Mesocricetus auratus
MSSETGPVVVDPTLRRRIEPHEFDAFFDQGELRKETCLLYEIRWGGRHNIWRHTGQNTSRHVEINFIEKFTSERYFYPSTRCSIVWFLSWSPCGECSKAITEFLSGHPNVTLFIYAARLYHHTDQRNRQGLRDLISRGVTIRIMTEQEYCYCWRNFVNYPPSNEVYWPRYPNLWMRLYALELYCIHLGLPPCLKIKRRHQYPLTFFRLNLQSCHYQRIPPHILWATGFI

SEQ ID NO: 1380 - protein, 236 aa, Pongo pygmaeus
MTSEKGPSTGDPTLRRRIESWEFDVFYDPRELRKETCLLYEIKWGMSRKIWRSSGKNTTNHVEVNFIKKFTSERRFHSSISCSITWFLSWSPCWECSQAIREFLSQHPGVTLVIYVARLFWHMDQRNRQGLRDLVNSGVTIQIMRASEYYHCWRNFVNYPPGDEAHWPQYPPLWMMLYALELHCIILSLPPCLKISRRWQNHLAFFRLHLQNCHYQTIPPHILLATGLIHPSVTWR

SEQ ID NO: 1381 - protein, 236 aa, Oryctolagus cuniculus
MASEKGPSNKDYTLRRRIEPWEFEVFFDPQELRKEACLLYEIKWGASSKTWRSSGKNTTNHVEVNFLEKLTSEGRLGPSTCCSITWFLSWSPCWECSMAIREFLSQHPGVTLIIFVARLFQHMDRRNRQGLKDLVTSGVTVRVMSVSEYCYCWENFVNYPPGKAAQWPRYPPRWMLMYALELYCIILGLPPCLKISRRHQKQLTFFSLTPQYCHYKMIPPYILLATGLLQPSVPWR

SEQ ID NO: 1382 - protein, 235 aa, Monodelphis domestica
MNSKTGPSVGDATLRRRIKPWEFVAFFNPQELRKETCLLYEIKWGNQNIWRHSNQNTSQHAEINFMEKFTAERHFNSSVRCSITWFLSWSPCWECSKAIRKFLDHYPNVTLAIFISRLYWHMDQQHRQGLKELVHSGVTIQIMSYSEYHYCWRNFVDYPQGEEDYWPKYPYLWIMLYVLELHCIILGLPPCLKISGSHSNQLALFSLDLQDCHYQKIPYNVLVATGLVQPFVTWR

SEQ ID NO: 1383 - protein, 224 aa, Pongo pygmaeus
MAQKEEAAAATEAASQNGEDLENLDDPEKLKELIELPPFEIVTGERLPANFFKFQFRNVEYSSGRNKTFLCYVVEAQGKGGQVQASRGYLEDEHAAAHAEEAFFNTILPAFDPALRYNVTWYVSSSPCAACADRIIKTLSKTKNLRLLILVGRLFMWEELEIQDALKKLKEAGCKLRIMKPQDFEYVWQNFVEQEEGESKAFQPWEDIQENFLYYEEKLADILK

SEQ ID NO: 1384 - protein, 224 aa, Bos taurus
MAQKEEAAAAAEPASQNGEEVENLEDPEKLKELIELPPFEIVTGERLPAHYFKFQFRNVEYSSGRNKTFLCYVVEAQSKGGQVQASRGYLEDEHATNHAEEAFFNSIMPTFDPALRYMVTWYVSSSPCAACADRIVKTLNKTKNLRLLILVGRLFMWEEPEIQAALRKLKEAGCRLRIMKPQDFEYIWQNFVEQEEGESKAFEPWEDIQENFLYYEEKLADILK

SEQ ID NO: 1385 - protein, 440 aa, Mus musculus
MQPQRLGPRAGMGPFCLGCSHRKCYSPIRNLISQETFKFHFKNLGYAKGRKDTFLCYEVTRKDCDSPVSLHHGVFKNKDNIHAEICFLYWFHDKVLKVLSPREEFKITWYMSWSPCFECAEQIVRFLATHHNLSLDIFSSRLYNVQDPETQQNLCRLVQEGAQVAAMDLYEFKKCWKKFVDNGGRRFRPWKRLLTNFRYQDSKLQEILRPCYISVPSSSSSTLSNICLTKGLPETRFWVEGRRMDPLSEEEFYSQFYNQRVKHLCYYHRMKPYLCYQLEQFNGQAPLKGCLLSEKGKQHAEILFLDKIRSMELSQVTITCYLTWSPCPNCAWQLAAFKRDRPDLILHIYTSRLYFHWKRPFQKGLCSLWQSGILVDVMDLPQFTDCWTNFVNPKRPFWPWKGLEIISRRTQRRLRRIKESWGLQDLVNDFGNLQLGPPMS

SEQ ID NO: 1386 - protein, 429 aa, Mus musculus
MGPFCLGCSHRKCYSPIRNLISQETFKFHFKNLGYAKGRKDTFLCYEVTRKDCDSPVSLHHGVFKNKDNIHAEICFLYWFHDKVLKVLSPREEFKITWYMSWSPCFECAEQIVRFLATHHNLSLDIFSSRLYNVQDPETQQNLCRLVQEGAQVAAMDLYEFKKCWKKFVDNGGRRFRPWKRLLTNFRYQDSKLQEILRPCYIPVPSSSSSTLSNICLTKGLPETRFCVEGRRMDPLSEEEFYSQFYNQRVKHLCYYHRMKPYLCYQLEQFNGQAPLKGCLLSEKGKQHAEILFLDKIRSMELSQVTITCYLTWSPCPNCAWQLAAFKRDRPDLILHIYTSRLYFHWKRPFQKGLCSLWQSGILVDVMDLPQFTDCWTNFVNPKRPFWPWKGLEIISRRTQRRLRRIKESWGLQDLVNDFGNLQLGPPMS

SEQ ID NO: 1387 - protein, 430 aa, Unknown
  Description of Unknown: APOBEC-3 polypeptide sequence
MGPFCLGCSHRKCYSPIRNLISQETFKFHFKNRLRYAIDRKDTFLCYEVTRKDCDSPVSLHHGVFKNKDNIHAEICFLYWFHDKVLKVLSPREEFKITWYMSWSPCFECAEQVLRFLATHHNLSLDIFSSRLYNIRDPENQQNLCRLVQEGAQVAAMDLYEFKKCWKKFVDNGGRRFRPWKKLLTNFRYQDSKLQEILRPCYIPVPSSSSSTLSNICLTKGLPETRFCVERRRVHLLSEEEFYSQFYNQRVKHLCYYHGVKPYLCYQLEQFNGQAPLKGCLLSEKGKQHAEILFLDKIRSMELSQVIITCYLTWSPCPNCAWQLAAFKRDRPDLILHIYTSRLYFHWKRPFQKGLCSLWQSGILVDVMDLPQFTDCWTNFVNPKRPFWPWKGLEIISRRTQRRLHRIKESWGLQDLVNDFGNLQLGPPMS

SEQ ID NO: 1388 - protein, 199 aa, Homo sapiens
MEASPASGPRHLMDPHIFTSNFNNGIGRHKTYLCYEVERLDNGTSVKMDQHRGFLHNQAKNLLCGFYGRHAELRFLDLVPSLQLDPAQIYRVTWFISWSPCFSWGCAGEVRAFLQENTHVRLRIFAARIYDYDPLYKEALQMLRDAGAQVSIMTYDEFKHCWDTFVDHQGCPFQPWDGLDEHSQALSGRLRAILQNQGN

SEQ ID NO: 1389 - protein, 373 aa, Homo sapiens
MKPHFRNTVERMYRDTFSYNFYNRPILSRRNTVWLCYEVKTKGPSRPRLDAKIFRGQVYSQPEHHAEMCFLSWFCGNQLPAYKCFQITWFVSWTPCPDCVAKLAEFLAEHPNVTLTISAARLYYYWERDYRRALCRLSQAGARVKIMDDEEFAYCWENFVYSEGQPFMPWYKFDDNYAFLHRTLKEILRNPMEAMYPHIFYFHFKNLRKAYGRNESWLCFTMEVVKHHSPVSWKRGVFRNQVDPETHCHAERCFLSWFCDDILSPNTNYEVTWYTSWSPCPECAGEVAEFLARHSNVNLTIFTARLYYFWDTDYQEGLRSLSQEGASVEIMGYKDFKYCWENFVYNDDEPFKPWKGLKYNFLFLDSKLQEILE

SEQ ID NO: 1390 - protein, 370 aa, Macaca mulatta
MVEPMDPRTFVSNFNNRPILSGLNTVWLCCEVKTKDPSGPPLDAKIFQGKVYSKAKYHPEMRFLRWFHKWRQLHHDQEYKVTWYVSWSPCTRCANSVATFLAKDPKVTLTIFVARLYYFWKPDYQQALRILCQKRGGPHATMKIMNYNEFQDCWNKFVDGRGKPFKPRNNLPKHYTLLQATLGELLRHLMDPGTFTSNFNNKPWVSGQHETYLCYKVERLHNDTWVPLNQHRGFLRNQAPNIHGFPKGRHAELCFLDLIPFWKLDGQQYRVTCFTSWSPCFSCAQEMAKFISNNEHVSLCIFAARIYDDQGRYQEGLRALHRDGAKIAMMNYSEFEYCWDTFVDRQGRPFQPWDGLDEHSQALSGRLRAI

SEQ ID NO: 1391 - protein, 384 aa, Pan troglodytes
MKPHFRNPVERMYQDTFSDNFYNRPILSHRNTVWLCYEVKTKGPSRPPLDAKIFRGQVYSKLKYHPEMRFFHWFSKWRKLHRDQEYEVTWYISWSPCTKCTRDVATFLAEDPKVTLTIFVARLYYFWDPDYQEALRSLCQKRDGPRATMKIMNYDEFQHCWSKFVYSQRELFEPWNNLPKYYILLHIMLGEILRHSMDPPTFTSNFNNELWVRGRHETYLCYEVERLHNDTWVLLNQRRGFLCNQAPHKHGFLEGRHAELCFLDVIPFWKLDLHQDYRVTCFTSWSPCFSCAQEMAKFISNNKHVSLCIFAARIYDDQGRCQEGLRTLAKAGAKISIMTYSEFKHCWDTFVDHQGCPFQPWDGLEEHSQALSGRLRAILQNQGN

SEQ ID NO: 1392 - protein, 377 aa, Chlorocebus sabaeus
MNPQIRNMVEQMEPDIFVYYFNNRPILSGRNTVWLCYEVKTKDPSGPPLDANIFQGKLYPEAKDHPEMKFLHWFRKWRQLHRDQEYEVTWYVSWSPCTRCANSVATFLAEDPKVTLTIFVARLYYFWKPDYQQALRILCQERGGPHATMKIMNYNEFQHCWNEFVDGQGKPFKPRKNLPKHYTLLHATLGELLRHVMDPGTFTSNFNNKPWVSGQRETYLCYKVERSHNDTWVLLNQHRGFLRNQAPDRHGFPKGRHAELCFLDLIPFWKLDDQQYRVTCFTSWSPCFSCAQKMAKFISNNKHVSLCIFAARIYDDQGRCQEGLRTLHRDGAKIAVMNYSEFEYCWDTFVDRQGRPFQPWDGLDEHSQALSGRLRAI

SEQ ID NO: 1393 - protein, 384 aa, Homo sapiens
MKPHFRNTVERMYRDTFSYNFYNRPILSRRNTVWLCYEVKTKGPSRPPLDAKIFRGQVYSELKYHPEMRFFHWFSKWRKLHRDQEYEVTWYISWSPCTKCTRDMATFLAEDPKVTLTIFVARLYYFWDPDYQEALRSLCQKRDGPRATMKIMNYDEFQHCWSKFVYSQRELFEPWNNLPKYYILLHIMLGEILRHSMDPPTFTFNFNNEPWVRGRHETYLCYEVERMHNDTWVLLNQRRGFLCNQAPHKHGFLEGRHAELCFLDVIPFWKLDLDQDYRVTCFTSWSPCFSCAQEMAKFISKNKHVSLCIFTARIYDDQGRCQEGLRTLAEAGAKISIMTYSEFKHCWDTFVDHQGCPFQPWDGLDEHSQDLSGRLRAILQNQEN

SEQ ID NO: 1394 - protein, 382 aa, Homo sapiens
MNPQIRNPMERMYRDTFYDNFENEPILYGRSYTWLCYEVKIKRGRSNLLWDTGVFRGQVYFKPQYHAEMCFLSWFCGNQLPAYKCFQITWFVSWTPCPDCVAKLAEFLSEHPNVTLTISAARLYYYWERDYRRALCRLSQAGARVTIMDYEEFAYCWENFVYNEGQQFMPWYKFDENYAFLHRTLKEILRYLMDPDTFTFNFNNDPLVLRRRQTYLCYEVERLDNGTWVLMDQHMGFLCNEAKNLLCGFYGRHAELRFLDLVPSLQLDPAQIYRVTWFISWSPCFSWGCAGEVRAFLQENTHVRLRIFAARIYDYDPLYKEALQMLRDAGAQVSIMTYDEFEYCWDTFVYRQGCPFQPWDGLEEHSQALSGRLRAILQNQGN

SEQ ID NO: 1395 - protein, 395 aa, Rattus norvegicus
MQPQGLGPNAGMGPVCLGCSHRRPYSPIRNPLKKLYQQTFYFHFKNVRYAWGRKNNFLCYEVNGMDCALPVPLRQGVFRKQGHIHAELCFIYWFHDKVLRVLSPMEEFKVTWYMSWSPCSKCAEQVARFLAAHRNLSLAIFSSRLYYYLRNPNYQQKLCRLIQEGVHVAAMDLPEFKKCWNKFVDNDGQPFRPWMRLRINFSFYDCKLQEIFSRMNLLREDVFYLQFNNSHRVKPVQNRYYRRKSYLCYQLERANGQEPLKGYLLYKKGEQHVEILFLEKMRSMELSQVRITCYLTWSPCPNCARQLAAFKKDHPDLILRIYTSRLYFWRKKFQKGLCTLWRSGIHVDVMDLPQFADCWTNFVNPQRPFRPWNELEKNSWRIQRRLRRIKESWGL

SEQ ID NO: 1396 - protein, 226 aa, Bos taurus
DGWEVAFRSGTVLKAGVLGVSMTEGWAGSGHPGQGACVWTPGTRNTMNLLREVLFKQQFGNQPRVPAPYYRRKTYLCYQLKQRNDLTLDRGCFRNKKQRHAERFIDKINSLDLNPSQSYKIICYITWSPCPNCANELVNFITRNNHLKLEIFASRLYFHWIKSFKMGLQDLQNAGISVAVMTHTEFEDCWEQFVDNQSRPFQPWDKLEQYSASIRRRLQRILTAPI

SEQ ID NO: 1397 - protein, 490 aa, Pan troglodytes
MNPQIRNPMEWMYQRTFYYNFENEPILYGRSYTWLCYEVKIRRGHSNLLWDTGVFRGQMYSQPEHHAEMCFLSWFCGNQLSAYKCFQITWFVSWTPCPDCVAKLAKFLAEHPNVTLTISAARLYYYWERDYRRALCRLSQAGARVKIMDDEEFAYCWENFVYNEGQPFMPWYKFDDNYAFLHRTLKEIIRHLMDPDTFTFNFNNDPLVLRRHQTYLCYEVERLDNGTWVLMDQHMGFLCNEAKNLLCGFYGRHAELRFLDLVPSLQLDPAQIYRVTWFISWSPCFSWGCAGQVRAFLQENTHVRLRIFAARIYDYDPLYKEALQMLRDAGAQVSIMTYDEFEYCWDTFVYRQGCPFQPWDGLEEHSQALSGRLRAILQVRASSLCMVPHRPPPPPQSPGPCLPLCSEPPLGSLLPTGRPAPSLPFLLTASFSFPPPASLPPLPSLSLSPGHLPVPSFHSLTSCSIQPPCSSRIRETEGWASVSKEGRDLG

SEQ ID NO: 1398 - protein, 190 aa, Homo sapiens
MNPQIRNPMKAMYPGTFYFQFKNLWEANDRNETWLCFTVEGIKRRSVVSWKTGVFRNQVDSETHCHAERCFLSWFCDDILSPNTKYQVTWYTSWSPCPDCAGEVAEFLARHSNVNLTIFTARLYYFQYPCYQEGLRSLSQEGVAVEIMDYEDFKYCWENFVYNDNEPFKPWKGLKTNFRLLKRRLRESLQ

SEQ ID NO: 1399 - protein, 190 aa, Gorilla gorilla
MNPQIRNPMKAMYPGTFYFQFKNLWEANDRNETWLCFTVEGIKRRSVVSWKTGVFRNQVDSETHCHAERCFLSWECDDILSPNTNYQVTWYTSWSPCPECAGEVAEFLARHSNVNLTIFTARLYYFQDTDYQEGLRSLSQEGVAVKIMDYKDFKYCWENFVYNDDEPFKPWKGLKYNFRFLKRRLQEILE

SEQ ID NO: 1400 - protein, 202 aa, Macaca mulatta
MDGSPASRPRHLMDPNTFTFNFNNDLSVRGRHQTYLCYEVERLDNGTWVPMDERRGFLCNKAKNVPCGDYGCHVELRFLCEVPSWQLDPAQTYRVTWFISWSPCFRRGCAGQVRVFLQENKHVRLRIFAARIYDYDPLYQEALRTLRDAGAQVSIMTYEEFKHCWDTFVDRQGRPFQPWDGLDEHSQALSGRLRAILQNQGN

SEQ ID NO: 1401 - protein, 185 aa, Bos taurus
MDEYTFTENFNNQGWPSKTYLCYEMERLDGDATIPLDEYKGFVRNKGLDQPEKPCHAELYFLGKIHSWNLDRNQHYRLTCFISWSPCYDCAQKLTTFLKENHHISLHILASRIYTHNRFGCHQSGLCELQAAGARITIMTFEDFKHCWETFVDHKGKPFQPWEGLNVKSQALCTELQAILKTQQN

SEQ ID NO: 1402 - protein, 200 aa, Homo sapiens
MALLTAETFRLQFNNKRRLRRPYYPRKALLCYQLTPQNGSTPTRGYFENKKKCHAEICFINEIKSMGLDETQCYQVTCYLTWSPCSSCAWELVDFIKAHDHLNLGIFASRLYYHWCKPQQKGLRLLCGSQVPVEVMGFPKFADCWENFVDHEKPLSFNPYKMLEELDKNSRAIKRRLERIKIPGVRAQGRYMDILCDAEV

SEQ ID NO: 1403 - protein, 210 aa, Macaca mulatta
MALLTAKTFSLQFNNKRRVNKPYYPRKALLCYQLTPQNGSTPTRGHLKNKKKDHAEIRFINKIKSMGLDETQCYQVTCYLTWSPCPSCAGELVDFIKAHRHLNLRIFASRLYYHWRPNYQEGLLLLCGSQVPVEVMGLPEFTDCWENFVDHKEPPSFNPSEKLEELDKNSQAIKRRLERIKSRSVDVLENGLRSLQLGPVTPSSSIRNSR

SEQ ID NO: 1404 - protein, 386 aa, Homo sapiens
MNPQIRNPMERMYRDTFYDNFENEPILYGRSYTWLCYEVKIKRGRSNLLWDTGVFRGPVLPKRQSNHRQEVYFRFENHAEMCFLSWFCGNRLPANRRFQITWFVSWNPCLPCVVKVTKFLAEHPNVTLTISAARLYYYRDRDWRWVLLRLHKAGARVKIMDYEDFAYCWENFVCNEGQPFMPWYKFDDNYASLHRTLKEILRNPMEAMYPHIFYFHFKNLLKACGRNESWLCFTMEVTKHHSAVFRKRGVFRNQVDPETHCHAERCFLSWFCDDILSPNTNYEVTWYTSWSPCPECAGEVAEFLARHSNVNLTIFTARLCYFWDTDYQEGLCSLSQEGASVKIMGYKDFVSCWKNFVYSDDEPFKPWKGLQTNFRLLKRRLREILQ

SEQ ID NO: 1405 - protein, 236 aa, Homo sapiens
MTSEKGPSTGDPTLRRRIEPWEFDVFYDPRELRKEACLLYEIKWGMSRKIWRSSGKNTTNHVEVNFIKKFTSERDFHPSMSCSITWFLSWSPCWECSQAIREFLSRHPGVTLVIYVARLFWHMDQQNRQGLRDLVNSGVTIQIMRASEYYHCWRNFVNYPPGDEAHWPQYPPLWMMLYALELHCIILSLPPCLKISRRWQNHLTFFRLHLQNCHYQTIPPHILLATGLIHPSVAWR

SEQ ID NO: 1406 - protein, 229 aa, Mus musculus
MSSETGPVAVDPTLRRRIEPHEFEVFFDPRELRKETCLLYEINWGGRHSVWRHTSQNTSNHVEVNFLEKFTTERYFRPNTRCSITWFLSWSPCGECSRAITEFLSRHPYVTLFIYIARLYHHTDQRNRQGLRDLISSGVTIQIMTEQEYCYCWRNFVNYPPSNEAYWPRYPHLWVKLYVLELYCIILGLPPCLKILRRKQPQLTFFTITLQTCHYQRIPPHLLWATGLK

SEQ ID NO: 1407 - protein, 224 aa, Homo sapiens
MAQKEEAAVATEAASQNGEDLENLDDPEKLKELIELPPFEIVTGERLPANFFKFQFRNVEYSSGRNKTFLCYVVEAQGKGGQVQASRGYLEDEHAAAHAEEAFFNTILPAFDPALRYNVTWYVSSSPCAACADRIIKTLSKTKNLRLLILVGRLFMWEEPEIQAALKKLKEAGCKLRIMKPQDFEYVWQNFVEQEEGESKAFQPWEDIQENFLYYEEKLADILK

SEQ ID NO: 1408 - protein, 224 aa, Mus musculus
MAQKEEAAEAAAPASQNGDDLENLEDPEKLKELIDLPPFEIVTGVRLPVNFFKFQFRNVEYSSGRNKTFLCYVVEVQSKGGQAQATQGYLEDEHAGAHAEEAFFNTILPAFDPALKYNVTWYVSSSPCAACADRILKTLSKTKNLRLLILVSRLFMWEEPEVQAALKKLKEAGCKLRIMKPQDFEYIWQNFVEQEEGESKAFEPWEDIQENFLYYEEKLADILK

SEQ ID NO: 1409 - protein, 224 aa, Rattus norvegicus
MAQKEEAAEAAAPASQNGDDLENLEDPEKLKELIDLPPFEIVTGVRLPVNFFKFQFRNVEYSSGRNKTFLCYVVEAQSKGGQVQATQGYLEDEHAGAHAEEAFFNTILPAFDPALKYNVTWYVSSSPCAACADRILKTLSKTKNLRLLILVSRLFMWEEPEVQAALKKLKEAGCKLRIMKPQDFEYLWQNFVEQEEGESKAFEPWEDIQENFLYYEEKLADILK

SEQ ID NO: 1410 - protein, 208 aa, Petromyzon marinus
MTDAEYVRIHEKLDIYTFKKQFFNNKKSVSHRCYVLFELKRRGERRACFWGYAVNKPQSGTERGIHAEIFSIRKVEEYLRDNPGQFTINWYSSWSPCADCAEKILEWYNQELRGNGHTLKIWACKLYYEKNARNQIGLWNLRDNGVGLNVMVSEHYQCCRKIFIQSSHNQLNENRWLEKTLKRAEKRRSELSFMIQVKILHTTKSPAV

SEQ ID NO: 1411 - protein, 381 aa, Artificial Sequence
  Description of Artificial Sequence: Synthetic polypeptide
MKPHFRNTVERMYRDTFSYNFYNRPILSRRNTVWLCYEVKTKGPSRPPLDAKIFRGQVYSELKYHPEMRFFHWFSKWRKLHRDQEYEVTWYISWSPCTKCTRDMATFLAEDPKVTLTIFVARLYYFWDPDYQEALRSLCQKRDGPRATMKFNYDEFQHCWSKFVYSQRELFEPWNNLPKYYILLHFMLGEILRHSMDPPTFTFNFNNEPWVRGRHETYLCYEVERMHNDTWVLLNQRRGFLCNQAPHKHGFLEGRHAELCFLDVIPFWKLDLDQDYRVTCFTSWSPCFSCAQEMAKFISKKHVSLCIFTARIYRRQGRCQEGLRTLAEAGAKISFTYSEFKHCWDTFVDHQGCPFQPWDGLDEHSQDLSGRLRAILQNQEN

SEQ ID NO: 1412 - protein, 182 aa, Homo sapiens
MDPPTFTFNFNNEPWWGRHETYLCYEVERMHNDTWVLLNQRRGFLCNQAPHKHGFLEGRHAELCFLDVIPFWKLDLDQDYRVTCFTSWSPCFSCAQEMAKFISKNKHVSLCIFTARIYDDQGRCQEGLRTLAEAGAKISFTYSEFKHCWDTFVDHQGCPFQPWDGLDEHSQDLSGRLRAILQ

SEQ ID NO: 1413 - skipped

SEQ ID NO: 1414 - protein, 184 aa, Artificial Sequence
  Description of Artificial Sequence: Synthetic polypeptide
MDPPTFTFNFNNEPWVRGRHETYLCYEVERMHNDTWVLLNQRRGFLCNQAPHKHGFLEGRHAELCFLDVIPFWKLDLDQDYRVTCFTSWSPCFSCAQEMAKFISKNKHVSLCIFTARIYRRQGRCQEGLRTLAEAGAKISFMTYSEFKHCWDTFVDHQGCPFQPWDGLDEHSQDLSGRLRAILQ

SEQ ID NO: 1415 - protein, 367 aa, Homo sapiens
MEPIYEEYLANHGTIVKPYYWLSFSLDCSNCPYHIRTGEEARVSLTEFCQIFGFPYGTTFPQTKHLTFYELKTSSGSLVQKGHASSCTGNYIHPESMLFEMNGYLDSAIYNNDSIRHIILYSNNSPCNEANHCCISKMYNFLITYPGITLSIYFSQLYHTEMDFPASAWNREALRSLASLWPRVVLSPISGGIWHSVLHSFISGVSGSHVFQPILTGRALADRHNAYEINAITGVKPYFTDVLLQTKRNPNTKAQEALESYPLNNAFPGQFFQMPSGQLQPNLPPDLRAPVVFVLVPLRDLPPMHMGQNPNKPRNIVRHLNMPQMSFQETKDLGRLPTGRSVEIVEITEQFASSKEADEKKKKKGKK

SEQ ID NO: 1416 - protein, 388 aa, Rattus norvegicus
MEPLYEEYLTHSGTIVKPYYWLSVSLNCTNCPYHIRTGEEARVPYTEFHQTFGFPWSTYPQTKHLTFYELRSSSGNLIQKGLASNCTGSHTHPESMLFERDGYLDSLIFHDSNIRHIILYSNNSPCDEANHCCISKMYNFLMNYPEVTLSVFFSQLYHTENQFPTSAWNREALRGLASLWPQVTLSAISGGIWQSILETFVSGISEGLTAVRPFTAGRTLTDRYNAYEINCITEVKPYFTDALHSWQKENQDQKVWAASENQPLHNTTPAQWQPDMSQDCRTPAVFMLVPYRDLPPIHVNPSPQKPRTVVRHLNTLQLSASKVKALRKSPSGRPVKKEEARKGSTRSQEANETNKSKWKKQTLFIKSNICHLLEREQKKIGILSSWSV

SEQ ID NO: 1417 - protein, 224 aa, Petromyzon marinus
MAGYECVRVSEKLDFDTFEFQFENLHYATERHRTYVIFDVKPQSAGGRSRRLWGYIINNPNVCHAELILMSMIDRHLESNPGVYAMTWYMSWSPCANCSSKLNPWLKNLLEEQGHTLTMHFSRIYDRDREGDHRGLRGLKHVSNSFRMGVVGRAEVKECLAEYVEASRRTLTWLDTTESMAAKMRRKLFCILVRCAGMRESGIPLHLFTLQTPLLSGRVVWWRV

SEQ ID NO: 1418 - protein, 331 aa, Petromyzon marinus
MELREVVDCALASCVRHEPLSRVAFLRCFAAPSQKPRGTVILFYVEGAGRGVTGGHAVNYNKQGTSIHAEVLLLSAVRAALLRRRRCEDGEEATRGCTLHCYSTYSPCRDCVEYIQEFGASTGVRVVIHCCRLYELDVNRRRSEAEGVLRSLSRLGRDFRLMGPRDAIALLLGGRLANTADGESGASGNAWVTETNVVEPLVDMTGFGDEDLHAQVQRNKQIREAYANYASAVSLMLGELHVDPDKFPFLAEFLAQTSVEPSGTPRETRGRPRGASSRGPEIGRQRPADFERALGAYGLFLHPRIVSREADREEIKRDLIVVMRKHNYQGP

SEQ ID NO: 1419 - protein, 209 aa, Petromyzon marinus
MAGDENVRVSEKLDFDTFEFQFENLHYATERHRTYVIFDVKPQSAGGRSRRLWGYIINNPNVCHAELILMSMIDRHLESNPGVYAMTWYMSWSPCANCSSKLNPWLKNLLEEQGHTLMMHFSRIYDRDREGDHRGLRGLKHVSNSFRMGVVGRAEVKECLAEYVEASRRTLTWLDTTESMAAKMRRKLFCILVRCAGMRESGMPLHLFT

SEQ ID NO: 1420 - protein, 158 aa, Unknown
  Description of Unknown: yCD polypeptide sequence
MVTGGMASKWDQKGMDIAYEEAALGYKEGGVPIGGCLINNKDGSVLGRGHNMRFQKGSATLHGEISTLENCGRLEGKVYKDTTLYTTLSPCDMCTGAIIMYGIPRCVVGENVNFKSKGEKYLQTRGHEVVVVDDERCKKIMKQFIDERPQDWFEDIGE

SEQ ID NO: 1421 - protein, 218 aa, Rattus norvegicus
MSSETGPVAVDPTLRRRIEPHEFEVFFDPRELRKETCLLYEINWGGRHSIWRHTSQNTNKHVEVNFIEKFTTERYFCPNTRCSITWFLSWSPCGECSRAITEFLSRYPHVTLFIYIARLYHHADPRNRQGLRDLISSGVTIQIMTEQESGYCWRNFVNYSPSNEAHWPRYPHLWVRGLPPCLNILRRKQPQLTFFTIALQSCHYQRLPPHILWATGLK

SEQ ID NO: 1422 - protein, 218 aa, Rattus norvegicus
MSSETGPVAVDPTLRRRIEPHEFEVFFDPRELRKETCLLYEINWGGRHSIWRHTSQNTNKHVEVNFIEKFTTERYFCPNTRCSITWFLSWSPCGECSRAITEFLSRYPHVTLFIYIARLYHHADPRNRQGLRDLISSGVTIQIMTEQESGYCWRNFVNYSPSNEAHWPRYPHLWVRLYVLELYCIILGLPPCLNILRRKQPQHYQRLPPHILWATGLK

SEQ ID NO: 1423 - protein, 1368 aa, Artificial Sequence
  Description of Artificial Sequence: Synthetic polypeptide
MDKKYSIGLAIGTNSVGWAVITDEYKVPSKKFKVLGNTDRHSIKKNLIGALLFDSGETAEATRLKRTARRRYTRRKNRICYLQEIFSNEMAKVDDSFFHRLEESFLVEEDKKHERHPIFGNIVDEVAYHEKYPTIYHLRKKLVDSTDKADLRLIYLALAHMIKFRGHFLIEGDLNPDNSDVDKLFIQLVQTYNQLFEENPINASGVDAKAILSARLSKSRRLENLIAQLPGEKKNGLFGNLIALSLGLTPNFKSNFDLAEDAKLQLSKDTYDDDLDNLLAQIGDQYADLFLAAKNLSDAILLSDILRVNTEITKAPLSASMIKRYDEHHQDLTLLKALVRQQLPEKYKEIFFDQSKNGYAGYIDGGASQEEFYKFIKPILEKMDGTEELLVKLNREDLLRKQRTFDNGSIPHQIHLGELHAILRRQEDFYPFLKDNREKIEKILTFRIPYYVGPLARGNSRFAWMTRKSEETITPWNFEEVVDKGASAQSFIERMTAFDKNLPNEKVLPKHSLLYEYFTVYNELTKVKYVTEGMRKPAFLSGEQKKAIVDLLFKTNRKVTVKQLKEDYFKKIECFDSVEISGVEDRFNASLGTYHDLLKIIKDKDFLDNEENEDILEDIVLTLTLFEDREMIEERLKTYAHLFDDKVMKQLKRRRYTGWGALSRKLINGIRDKQSGKTILDFLKSDGFANRNFMALIHDDSLTFKEDIQKAQVSGQGDSLHEHIANLAGSPAIKKGILQTVKVVDELVKVMGRHKPENIVIEMARENQTTQKGQKNSRERMKRIEEGIKELGSQILKEHPVENTQLQNEKLYLYYLQNGRDMYVDQELDINRLSDYDVDHIVPQSFLKDDSIDNKVLTRSDKNRGKSDNVPSEEVVKKMKNYWRQLLNAKLITQRKFDNLTKAERGGLSELDKAGFIKRQLVETRAITKHVAQILDSRMNTKYDENDKLIREVKVITLKSKLVSDFRKDFQFYKVREINNYHHAHDAYLNAVVGTALIKKYPKLESEFVYGDYKVYDVRKMIAKSEQEIGKATAKYFFYSNIMNFFKTEITLANGEIRKRPLIETNGETGEIVWDKGRDFATVRKVLSMPQVNIVKKTEVQTGGFSKESILPKRNSDKLIARKKDWDPKKYGGFDSPTVAYSVLVVAKVEKGKSKKLKSVKELLGITIMERSSFEKNPIDFLEAKGYKEVKKDLIIKLPKYSLFELENGRKRMLASAGELQKGNELALPSKYVNFLYLASHYEKLKGSPEDNEQKQLFVEQHKHYLDEIIEQISEFSKRVILADANLDKVLSAYNKHRDKPIREQAENIIHLFTLTNLGAPAAFKYFDTTIDRKRYTSTKEVLDATLIHQSITGLYETRIDLSQLGGD

SEQ ID NO: 1424 - protein, 23 aa, Artificial Sequence
  Description of Artificial Sequence: Synthetic peptide
RKSGKIAAIVVKRPRKPKKKRKV

SEQ ID NO: 1425 - protein, 8 aa, Artificial Sequence
  Description of Artificial Sequence: Synthetic peptide
SGGSSGGS

SEQ ID NO: 1426 - protein, 1609 aa, Artificial Sequence
  Description of Artificial Sequence: Synthetic polypeptide
MSEVEFSHEYWMRHALTLAKRARDEREVPVGAVLVLNNRVIGEGWNRAIGLHDPTAHAEIMALRQGGLVMQNYRLIDATLYVTFEPCVMCAGAMIHSRIGRVVFGVRNAKTGAAGSLMDVLHYPGMNHRVEITEGILADECAALLCTFFRMPRQVFNAQKKAQSSTDSGGSSGGSSGSETPGTSESATPESSGGSSGGSEIGKATAKYFFYSNIMNFFKTEITLANGEIRKRPLIETNGETGEIVWDKGRDFATVRKVLSMPQVNIVKKTEVQTGGFSKESILPKRNSDKLIARKKDWDPKKYGGFMQPTVAYSVLVVAKVEKGKSKKLKSVKELLGITIMERSSFEKNPIDFLEAKGYKEVKKDLIIKLPKYSLFELENGRKRMLASAKFLQKGNELALPSKYVNFLYLASHYEKLKGSPEDNEQKQLFVEQHKHYLDEIIEQISEFSKRVILADANLDKVLSAYNKHRDKPIREQAENIIHLFTLTNLGAPRAFKYFDTTIARKEYRSTKEVLDATLIHQSITGLYETRIDLSQLGGDGGSGGSGGSGGSGGSGGSGGMDKKYSIGLAIGTNSVGWAVITDEYKVPSKKFKVLGNTDRHSIKKNLIGALLFDSGETAEATRLKRTARRRYTRRKNRICYLQEIFSNEMAKVDDSFFHRLEESFLVEEDKKHERHPIFGNIVDEVAYHEKYPTIYHLRKKLVDSTDKADLRLIYLALAHMIKFRGHFLIEGDLNPDNSDVDKLFIQLVQTYNQLFEENPINASGVDAKAILSARLSKSRRLENLIAQLPGEKKNGLFGNLIALSLGLTPNFKSNFDLAEDAKLQLSKDTYDDDLDNLLAQIGDQYADLFLAAKNLSDAILLSDILRVNTEITKAPLSASMIKRYDEHHQDLTLLKALVRQQLPEKYKEIFFDQSKNGYAGYIDGGASQEEFYKFIKPILEKMDGTEELLVKLNREDLLRKQRTFDNGSIPHQIHLGELHAILRRQEDFYPFLKDNREKIEKILTFRIPYYVGPLARGNSRFAWMTRKSEETITPWNFEEVVDKGASAQSFIERMTNFDKNLPNEKVLPKHSLLYEYFTVYNELTKVKYVTEGMRKPAFLSGEQKKAIVDLLFKTNRKVTVKQLKEDYFKKIECFDSVEISGVEDRFNASLGTYHDLLKIIKDKDFLDNEENEDILEDIVLTLTLFEDREMIEERLKTYAHLFDDKVMKQLKRRRYTGWGRLSRKLINGIRDKQSGKTILDFLKSDGFANRNFMQLIHDDSLTFKEDIQKAQVSGQGDSLHEHIANLAGSPAIKKGILQTVKVVDELVKVMGRHKPENIVIEMARENQTTQKGQKNSRERMKRIEEGIKELGSQILKEHPVENTQLQNEKLYLYYLQNGRDMYVDQELDINRLSDYDVDHIVPQSFLKDDSIDNKVLTRSDKNRGKSDNVPSEEVVKKMKNYWRQLLNAKLITQRKFDNLTKAERGGLSELDKAGFIKRQLVETRQITKHVAQILDSRMNTKYDENDKLIREVKVITLKSKLVSDFRKDFQFYKVREINNYHHAHDAYLNAVVGTALIKKYPKLESEFVYGDYKVYDVRKMIAKSEQEGADKRTADGSEFESPKKKRKV

SEQ ID NO: 1427 - protein, 1807 aa, Artificial Sequence
  Description of Artificial Sequence: Synthetic polypeptide
MSEVEFSHEYWMRHALTLAKRAWDEREVPVGAVLVHNNRVIGEGWNRPIGRHDPTAHAEIMALRQGGLVMQNYRLIDATLYVTLEPCVMCAGAMIHSRIGRVVFGARDAKTGAAGSLMDVLHHPGMNHRVEITEGILADECAALLSDFFRMRRQEIKAQKKAQSSTDGGSSGGSSGSETPGTSESATPESSGGSSGGSMSEVEFSHEYWMRHALTLAKRARDEREVPVGAVLVLNNRVIGEGWNRAIGLHDPTAHAEIMALRQGGLVMQNYRLIDATLYVTFEPCVMCAGAMIHSRIGRVVFGVRNAKTGAAGSLMDVLHYPGMNHRVEITEGILADECAALLCTFFRMPRQVFNAQKKAQSSTDSGGSSGGSSGSETPGTSESATPESSGGSSGGSEIGKATAKYFFYSNIMNFFKTEITLANGEIRKRPLIETNGETGEIVWDKGRDFATVRKVLSMPQVNIVKKTEVQTGGFSKESILPKRNSDKLIARKKDWDPKKYGGFMQPTVAYSVLVVAKVEKGKSKKLKSVKELLGITIMERSSFEKNPIDFLEAKGYKEVKKDLIIKLPKYSLFELENGRKRMLASAKFLQKGNELALPSKYVNFLYLASHYEKLKGSPEDNEQKQLFVEQHKHYLDEIIEQISEFSKRVILADANLDKVLSAYNKHRDKPIREQAENIIHLFTLTNLGAPRAFKYFDTTIARKEYRSTKEVLDATLIHQSITGLYETRIDLSQLGGDGGSGGSGGSGGSGGSGGSGGMDKKYSIGLAIGTNSVGWAVITDEYKVPSKKFKVLGNTDRHSIKKNLIGALLFDSGETAEATRLKRTARRRYTRRKNRICYLQEIFSNEMAKVDDSFFHRLEESFLVEEDKKHERHPIFGNIVDEVAYHEKYPTIYHLRKKLVDSTDKADLRLIYLALAHMIKFRGHFLIEGDLNPDNSDVDKLFIQLVQTYNQLFEENPINASGVDAKAILSARLSKSRRLENLIAQLPGEKKNGLFGNLIALSLGLTPNFKSNFDLAEDAKLQLSKDTYDDDLDNLLAQIGDQYADLFLAAKNLSDAILLSDILRVNTEITKAPLSASMIKRYDEHHQDLTLLKALVRQQLPEKYKEIFFDQSKNGYAGYIDGGASQEEFYKFIKPILEKMDGTEELLVKLNREDLLRKQRTFDNGSIPHQIHLGELHAILRRQEDFYPFLKDNREKIEKILTFRIPYYVGPLARGNSRFAWMTRKSEETITPWNFEEVVDKGASAQSFIERMTNFDKNLPNEKVLPKHSLLYEYFTVYNELTKVKYVTEGMRKPAFLSGEQKKAIVDLLFKTNRKVTVKQLKEDYFKKIECFDSVEISGVEDRFNASLGTYHDLLKIIKDKDFLDNEENEDILEDIVLTLTLFEDREMIEERLKTYAHLFDDKVMKQLKRRRYTGWGRLSRKLINGIRDKQSGKTILDFLKSDGFANRNFMQLIHDDSLTFKEDIQKAQVSGQGDSLHEHIANLAGSPAIKKGILQTVKVVDELVKVMGRHKPENIVIEMARENQTTQKGQKNSRERMKRIEEGIKELGSQILKEHPVENTQLQNEKLYLYYLQNGRDMYVDQELDINRLSDYDVDHIVPQSFLKDDSIDNKVLTRSDKNRGKSDNVPSEEVVKKMKNYWRQLLNAKLITQRKFDNLTKAERGGLSELDKAGFIKRQLVETRQITKHVAQILDSRMNTKYDENDKLIREVKVITLKSKLVSDFRKDFQFYKVREINNYHHAHDAYLNAVVGTALIKKYPKLESEFVYGDYKVYDVRKMIAKSEQEGADKRTADGSEFESPKKKRKV

SEQ ID NO: 1428 - protein, 1588 aa, Artificial Sequence
  Description of Artificial Sequence: Synthetic polypeptide
MSEVEFSHEYWMRHALTLAKRARDEREVPVGAVLVLNNRVIGEGWNRAIGLHDPTAHAEIMALRQGGLVMQNYRLIDATLYVTFEPCVMCAGAMIHSRIGRVVFGVRNAKTGAAGSLMDVLHHPGMNHRVEITEGILADECAALLCRFFRMPRRVFNAQKKAQSSTDSGGSSGGSSGSETPGTSESATPESSGGSSGGSDKKYSIGLAIGTNSVGWAVITDEYKVPSKKFKVLGNTDRHSIKKNLIGALLFDSGETAEATRLKRTARRRYTRRKNRICYLQEIFSNEMAKVDDSFFHRLEESFLVEEDKKHERHPIFGNIVDEVAYHEKYPTIYHLRKKLVDSTDKADLRLIYLALAHMIKFRGHFLIEGDLNPDNSDVDKLFIQLVQTYNQLFEENPINASGVDAKAILSARLSKSRRLENLIAQLPGEKKNGLFGNLIALSLGLTPNFKSNFDLAEDAKLQLSKDTYDDDLDNLLAQIGDQYADLFLAAKNLSDAILLSDILRVNTEITKAPLSASMIKRYDEHHQDLTLLKALVRQQLPEKYKEIFFDQSKNGYAGYIDGGASQEEFYKFIKPILEKMDGTEELLVKLNREDLLRKQRTFDNGSIPHQIHLGELHAILRRQEDFYPFLKDNREKIEKILTFRIPYYVGPLARGNSRFAWMTRKSEETITPWNFEEVVDKGASAQSFIERMTNFDKNLPNEKVLPKHSLLYEYFTVYNELTKVKYVTEGMRKPAFLSGEQKKAIVDLLFKTNRKVTVKQLKEDYFKKIECFDSVEISGVEDRFNASLGTYHDLLKIIKDKDFLDNEENEDILEDIVLTLTLFEDREMIEERLKTYAHLFDDKVMKQLKRRRYTGWGRLSRKLINGIRDKQSGKTILDFLKSDGFANRNFMQLIHDDSLTFKEDIQKAQVSGQGDSLHEHIANLAGSPAIKKGILQTVKVVDELVKVMGRHKPENIVIEMARENQTTQKGQKNSRERMKRIEEGIKELGSQILKEHPVENTQLQNEKLYLYYLQNGRDMYVDQELDINRLSDYDVDHIVPQSFLKDDSIDNKVLTRSDKNRGKSDNVPSEEVVKKMKNYWRQLLNAKLITQRKFDNLTKAERGGLSELDKAGFIKRQLVETRQITKHVAQILDSRMNTKYDENDKLIREVKVITLKSKLVSDFRKDFQFYKVREINNYHHAHDAYLNAVVGTALIKKYPKLESEFVYGDYKVYDVRKMIAKSEQEIGKATAKYFFYSNIMNFFKTEITLANGEIRKRPLIETNGETGEIVWDKGRDFATVRKVLSMPQVNIVKKTEVQTGGFSKESILPKRNSDKLIARKKDWDPKKYGGFDSPTVAYSVLVVAKVEKGKSKKLKSVKELLGITIMERSSFEKNPIDFLEAKGYKEVKKDLIIKLPKYSLFELENGRKRMLASAGELQKGNELALPSKYVNFLYLASHYEKLKGSPEDNEQKQLFVEQHKHYLDEIIEQISEFSKRVILADANLDKVLSAYNKHRDKPIREQAENIIHLFTLTNLGAPAAFKYFDTTIDRKRYTSTKEVLDATLIHQSITGLYETRIDLSQLGGDEGADKRTADGSEFESPKKKRKV

SEQ ID NO: 1429 - protein, 1786 aa, Artificial Sequence
  Description of Artificial Sequence: Synthetic polypeptide
MSEVEFSHEYWMRHALTLAKRAWDEREVPVGAVLVHNNRVIGEGWNRPIGRHDPTAHAEIMALRQGGLVMQNYRLIDATLYVTLEPCVMCAGAMIHSRIGRVVFGARDAKTGAAGSLMDVLHHPGMNHRVEITEGILADECAALLSDFFRMRRQEIKAQKKAQSSTDSGGSSGGSSGSETPGTSESATPESSGGSSGGSSEVEFSHEYWMRHALTLAKRARDEREVPVGAVLVLNNRVIGEGWNRAIGLHDPTAHAEIMALRQGGLVMQNYRLIDATLYVTFEPCVMCAGAMIHSRIGRVVFGVRNAKTGAAGSLMDVLHHPGMNHRVEITEGILADECAALLCRFFRMPRRVFNAQKKAQSSTDSGGSSGGSSGSETPGTSESATPESSGGSSGGSDKKYSIGLAIGTNSVGWAVITDEYKVPSKKFKVLGNTDRHSIKKNLIGALLFDSGETAEATRLKRTARRRYTRRKNRICYLQEIFSNEMAKVDDSFFHRLEESFLVEEDKKHERHPIFGNIVDEVAYHEKYPTIYHLRKKLVDSTDKADLRLIYLALAHMIKFRGHFLIEGDLNPDNSDVDKLFIQLVQTYNQLFEENPINASGVDAKAILSARLSKSRRLENLIAQLPGEKKNGLFGNLIALSLGLTPNFKSNFDLAEDAKLQLSKDTYDDDLDNLLAQIGDQYADLFLAAKNLSDAILLSDILRVNTEITKAPLSASMIKRYDEHHQDLTLLKALVRQQLPEKYKEIFFDQSKNGYAGYIDGGASQEEFYKFIKPILEKMDGTEELLVKLNREDLLRKQRTFDNGSIPHQIHLGELHAILRRQEDFYPFLKDNREKIEKILTFRIPYYVGPLARGNSRFAWMTRKSEETITPWNFEEVVDKGASAQSFIERMTNFDKNLPNEKVLPKHSLLYEYFTVYNELTKVKYVTEGMRKPAFLSGEQKKAIVDLLFKTNRKVTVKQLKEDYFKKIECFDSVEISGVEDRFNASLGTYHDLLKIIKDKDFLDNEENEDILEDIVLTLTLFEDREMIEERLKTYAHLFDDKVMKQLKRRRYTGWGRLSRKLINGIRDKQSGKTILDFLKSDGFANRNFMQLIHDDSLTFKEDIQKAQVSGQGDSLHEHIANLAGSPAIKKGILQTVKVVDELVKVMGRHKPENIVIEMARENQTTQKGQKNSRERMKRIEEGIKELGSQILKEHPVENTQLQNEKLYLYYLQNGRDMYVDQELDINRLSDYDVDHIVPQSFLKDDSIDNKVLTRSDKNRGKSDNVPSEEVVKKMKNYWRQLLNAKLITQRKFDNLTKAERGGLSELDKAGFIKRQLVETRQITKHVAQILDSRMNTKYDENDKLIREVKVITLKSKLVSDFRKDFQFYKVREINNYHHAHDAYLNAVVGTALIKKYPKLESEFVYGDYKVYDVRKMIAKSEQEIGKATAKYFFYSNIMNFFKTEITLANGEIRKRPLIETNGETGEIVWDKGRDFATVRKVLSMPQVNIVKKTEVQTGGFSKESILPKRNSDKLIARKKDWDPKKYGGFDSPTVAYSVLVVAKVEKGKSKKLKSVKELLGITIMERSSFEKNPIDFLEAKGYKEVKKDLIIKLPKYSLFELENGRKRMLASAGELQKGNELALPSKYVNFLYLASHYEKLKGSPEDNEQKQLFVEQHKHYLDEIIEQISEFSKRVILADANLDKVLSAYNKHRDKPIREQAENIIHLFTLTNLGAPAAFKYFDTTIDRKRYTSTKEVLDATLIHQSITGLYETRIDLSQLGGDEGADKRTADGSEFESPKKKRKV

SEQ ID NO: 1430 - protein, 1588 aa, Artificial Sequence
  Description of Artificial Sequence: Synthetic polypeptide
MSEVEFSHEYWMRHALTLAKRARDEREVPVGAVLVLNNRVIGEGWNRAIGLHDPTAHAEIMALRQGGLVMQNYRLYDATLYVTFEPCVMCAGAMIHSRIGRVVFGVRNAKTGAAGSLMDVLHHPGMNHRVEITEGILADECAALLCRFFRMPRRVFNAQKKAQSSTDSGGSSGGSSGSETPGTSESATPESSGGSSGGSDKKYSIGLAIGTNSVGWAVITDEYKVPSKKFKVLGNTDRHSIKKNLIGALLFDSGETAEATRLKRTARRRYTRRKNRICYLQEIFSNEMAKVDDSFFHRLEESFLVEEDKKHERHPIFGNIVDEVAYHEKYPTIYHLRKKLVDSTDKADLRLIYLALAHMIKFRGHFLIEGDLNPDNSDVDKLFIQLVQTYNQLFEENPINASGVDAKAILSARLSKSRRLENLIAQLPGEKKNGLFGNLIALSLGLTPNFKSNFDLAEDAKLQLSKDTYDDDLDNLLAQIGDQYADLFLAAKNLSDAILLSDILRVNTEITKAPLSASMIKRYDEHHQDLTLLKALVRQQLPEKYKEIFFDQSKNGYAGYIDGGASQEEFYKFIKPILEKMDGTEELLVKLNREDLLRKQRTFDNGSIPHQIHLGELHAILRRQEDFYPFLKDNREKIEKILTFRIPYYVGPLARGNSRFAWMTRKSEETITPWNFEEVVDKGASAQSFIERMTNFDKNLPNEKVLPKHSLLYEYFTVYNELTKVKYVTEGMRKPAFLSGEQKKAIVDLLFKTNRKVTVKQLKEDYFKKIECFDSVEISGVEDRFNASLGTYHDLLKIIKDKDFLDNEENEDILEDIVLTLTLFEDREMIEERLKTYAHLFDDKVMKQLKRRRYTGWGRLSRKLINGIRDKQSGKTILDFLKSDGFANRNFMQLIHDDSLTFKEDIQKAQVSGQGDSLHEHIANLAGSPAIKKGILQTVKVVDELVKVMGRHKPENIVIEMARENQTTQKGQKNSRERMKRIEEGIKELGSQILKEHPVENTQLQNEKLYLYYLQNGRDMYVDQELDINRLSDYDVDHIVPQSFLKDDSIDNKVLTRSDKNRGKSDNVPSEEVVKKMKNYWRQLLNAKLITQRKFDNLTKAERGGLSELDKAGFIKRQLVETRQITKHVAQILDSRMNTKYDENDKLIREVKVITLKSKLVSDFRKDFQFYKVREINNYHHAHDAYLNAVVGTALIKKYPKLESEFVYGDYKVYDVRKMIAKSEQEIGKATAKYFFYSNIMNFFKTEITLANGEIRKRPLIETNGETGEIVWDKGRDFATVRKVLSMPQVNIVKKTEVQTGGFSKESILPKRNSDKLIARKKDWDPKKYGGFDSPTVAYSVLVVAKVEKGKSKKLKSVKELLGITIMERSSFEKNPIDFLEAKGYKEVKKDLIIKLPKYSLFELENGRKRMLASAGELQKGNELALPSKYVNFLYLASHYEKLKGSPEDNEQKQLFVEQHKHYLDEIIEQISEFSKRVILADANLDKVLSAYNKHRDKPIREQAENIIHLFTLTNLGAPAAFKYFDTTIDRKRYTSTKEVLDATLIHQSITGLYETRIDLSQLGGDEGADKRTADGSEFESPKKKRKV

SEQ ID NO: 1431 - protein, 1786 aa, Artificial Sequence
  Description of Artificial Sequence: Synthetic polypeptide
MSEVEFSHEYWMRHALTLAKRAWDEREVPVGAVLVHNNRVIGEGWNRPIGRHDPTAHAEIMALRQGGLVMQNYRLIDATLYVTLEPCVMCAGAMIHSRIGRVVFGARDAKTGAAGSLMDVLHHPGMNHRVEITEGILADECAALLSDFFRMRRQEIKAQKKAQSSTDSGGSSGGSSGSETPGTSESATPESSGGSSGGSSEVEFSHEYWMRHALTLAKRARDEREVPVGAVLVLNNRVIGEGWNRAIGLHDPTAHAEIMALRQGGLVMQNYRLYDATLYVTFEPCVMCAGAMIHSRIGRVVFGVRNAKTGAAGSLMDVLHHPGMNHRVEITEGILADECAALLCRFFRMPRRVFNAQKKAQSSTDSGGSSGGSSGSETPGTSESATPESSGGSSGGSDKKYSIGLAIGTNSVGWAVITDEYKVPSKKFKVLGNTDRHSIKKNLIGALLFDSGETAEATRLKRTARRRYTRRKNRICYLQEIFSNEMAKVDDSFFHRLEESFLVEEDKKHERHPIFGNIVDEVAYHEKYPTIYHLRKKLVDSTDKADLRLIYLALAHMIKFRGHFLIEGDLNPDNSDVDKLFIQLVQTYNQLFEENPINASGVDAKAILSARLSKSRRLENLIAQLPGEKKNGLFGNLIALSLGLTPNFKSNFDLAEDAKLQLSKDTYDDDLDNLLAQIGDQYADLFLAAKNLSDAILLSDILRVNTEITKAPLSASMIKRYDEHHQDLTLLKALVRQQLPEKYKEIFFDQSKNGYAGYIDGGASQEEFYKFIKPILEKMDGTEELLVKLNREDLLRKQRTFDNGSIPHQIHLGELHAILRRQEDFYPFLKDNREKIEKILTFRIPYYVGPLARGNSRFAWMTRKSEETITPWNFEEVVDKGASAQSFIERMTNFDKNLPNEKVLPKHSLLYEYFTVYNELTKVKYVTEGMRKPAFLSGEQKKAIVDLLFKTNRKVTVKQLKEDYFKKIECFDSVEISGVEDRFNASLGTYHDLLKIIKDKDFLDNEENEDILEDIVLTLTLFEDREMIEERLKTYAHLFDDKVMKQLKRRRYTGWGRLSRKLINGIRDKQSGKTILDFLKSDGFANRNFMQLIHDDSLTFKEDIQKAQVSGQGDSLHEHIANLAGSPAIKKGILQTVKVVDELVKVMGRHKPENIVIEMARENQTTQKGQKNSRERMKRIEEGIKELGSQILKEHPVENTQLQNEKLYLYYLQNGRDMYVDQELDINRLSDYDVDHIVPQSFLKDDSIDNKVLTRSDKNRGKSDNVPSEEVVKKMKNYWRQLLNAKLITQRKFDNLTKAERGGLSELDKAGFIKRQLVETRQITKHVAQILDSRMNTKYDENDKLIREVKVITLKSKLVSDFRKDFQFYKVREINNYHHAHDAYLNAVVGTALIKKYPKLESEFVYGDYKVYDVRKMIAKSEQEIGKATAKYFFYSNIMNFFKTEITLANGEIRKRPLIETNGETGEIVWDKGRDFATVRKVLSMPQVNIVKKTEVQTGGFSKESILPKRNSDKLIARKKDWDPKKYGGFDSPTVAYSVLVVAKVEKGKSKKLKSVKELLGITIMERSSFEKNPIDFLEAKGYKEVKKDLIIKLPKYSLFELENGRKRMLASAGELQKGNELALPSKYVNFLYLASHYEKLKGSPEDNEQKQLFVEQHKHYLDEIIEQISEFSKRVILADANLDKVLSAYNKHRDKPIREQAENIIHLFTLTNLGAPAAFKYFDTTIDRKRYTSTKEVLDATLIHQSITGLYETRIDLSQLGGDEGADKRTADGSEFESPKKKRKV

SEQ ID NO: 1432 - protein, 1588 aa, Artificial Sequence
  Description of Artificial Sequence: Synthetic polypeptide
MSEVEFSHEYWMRHALTLAKRARDEREVPVGAVLVLNNRVIGEGWNRAIGLHDPTAHAEIMALRQGGLVMQNYRLIDATLYSTFEPCVMCAGAMIHSRIGRVVFGVRNAKTGAAGSLMDVLHYPGMNHRVEITEGILADECAALLCYFFRMPRRVFNAQKKAQSSTDSGGSSGGSSGSETPGTSESATPESSGGSSGGSDKKYSIGLAIGTNSVGWAVITDEYKVPSKKFKVLGNTDRHSIKKNLIGALLFDSGETAEATRLKRTARRRYTRRKNRICYLQEIFSNEMAKVDDSFFHRLEESFLVEEDKKHERHPIFGNIVDEVAYHEKYPTIYHLRKKLVDSTDKADLRLIYLALAHMIKFRGHFLIEGDLNPDNSDVDKLFIQLVQTYNQLFEENPINASGVDAKAILSARLSKSRRLENLIAQLPGEKKNGLFGNLIALSLGLTPNFKSNFDLAEDAKLQLSKDTYDDDLDNLLAQIGDQYADLFLAAKNLSDAILLSDILRVNTEITKAPLSASMIKRYDEHHQDLTLLKALVRQQLPEKYKEIFFDQSKNGYAGYIDGGASQEEFYKFIKPILEKMDGTEELLVKLNREDLLRKQRTFDNGSIPHQIHLGELHAILRRQEDFYPFLKDNREKIEKILTFRIPYYVGPLARGNSRFAWMTRKSEETITPWNFEEVVDKGASAQSFIERMTNFDKNLPNEKVLPKHSLLYEYFTVYNELTKVKYVTEGMRKPAFLSGEQKKAIVDLLFKTNRKVTVKQLKEDYFKKIECFDSVEISGVEDRFNASLGTYHDLLKIIKDKDFLDNEENEDILEDIVLTLTLFEDREMIEERLKTYAHLFDDKVMKQLKRRRYTGWGRLSRKLINGIRDKQSGKTILDFLKSDGFANRNFMQLIHDDSLTFKEDIQKAQVSGQGDSLHEHIANLAGSPAIKKGILQTVKVVDELVKVMGRHKPENIVIEMARENQTTQKGQKNSRERMKRIEEGIKELGSQILKEHPVENTQLQNEKLYLYYLQNGRDMYVDQELDINRLSDYDVDHIVPQSFLKDDSIDNKVLTRSDKNRGKSDNVPSEEVVKKMKNYWRQLLNAKLITQRKFDNLTKAERGGLSELDKAGFIKRQLVETRQITKHVAQILDSRMNTKYDENDKLIREVKVITLKSKLVSDFRKDFQFYKVREINNYHHAHDAYLNAVVGTALIKKYPKLESEFVYGDYKVYDVRKMIAKSEQEIGKATAKYFFYSNIMNFFKTEITLANGEIRKRPLIETNGETGEIVWDKGRDFATVRKVLSMPQVNIVKKTEVQTGGFSKESILPKRNSDKLIARKKDWDPKKYGGFDSPTVAYSVLVVAKVEKGKSKKLKSVKELLGITIMERSSFEKNPIDFLEAKGYKEVKKDLIIKLPKYSLFELENGRKRMLASAGELQKGNELALPSKYVNFLYLASHYEKLKGSPEDNEQKQLFVEQHKHYLDEIIEQISEFSKRVILADANLDKVLSAYNKHRDKPIREQAENIIHLFTLTNLGAPAAFKYFDTTIDRKRYTSTKEVLDATLIHQSITGLYETRIDLSQLGGDEGADKRTADGSEFESPKKKRKV

SEQ ID NO: 1433 - protein, 1786 aa, Artificial Sequence
  Description of Artificial Sequence: Synthetic polypeptide
MSEVEFSHEYWMRHALTLAKRAWDEREVPVGAVLVHNNRVIGEGWNRPIGRHDPTAHAEIMALRQGGLVMQNYRLIDATLYVTLEPCVMCAGAMIHSRIGRVVFGARDAKTGAAGSLMDVLHHPGMNHRVEITEGILADECAALLSDFFRMRRQEIKAQKKAQSSTDSGGSSGGSSGSETPGTSESATPESSGGSSGGSSEVEFSHEYWMRHALTLAKRARDEREVPVGAVLVLNNRVIGEGWNRAIGLHDPTAHAEIMALRQGGLVMQNYRLIDATLYSTFEPCVMCAGAMIHSRIGRVVFGVRNAKTGAAGSLMDVLHYPGMNHRVEITEGILADECAALLCYFFRMPRRVFNAQKKAQSSTDSGGSSGGSSGSETPGTSESATPESSGGSSGGSDKKYSIGLAIGTNSVGWAVITDEYKVPSKKFKVLGNTDRHSIKKNLIGALLFDSGETAEATRLKRTARRRYTRRKNRICYLQEIFSNEMAKVDDSFFHRLEESFLVEEDKKHERHPIFGNIVDEVAYHEKYPTIYHLRKKLVDSTDKADLRLIYLALAHMIKFRGHFLIEGDLNPDNSDVDKLFIQLVQTYNQLFEENPINASGVDAKAILSARLSKSRRLENLIAQLPGEKKNGLFGNLIALSLGLTPNFKSNFDLAEDAKLQLSKDTYDDDLDNLLAQIGDQYADLFLAAKNLSDAILLSDILRVNTEITKAPLSASMIKRYDEHHQDLTLLKALVRQQLPEKYKEIFFDQSKNGYAGYIDGGASQEEFYKFIKPILEKMDGTEELLVKLNREDLLRKQRTFDNGSIPHQIHLGELHAILRRQEDFYPFLKDNREKIEKILTFRIPYYVGPLARGNSRFAWMTRKSEETITPWNFEEVVDKGASAQSFIERMTNFDKNLPNEKVLPKHSLLYEYFTVYNELTKVKYVTEGMRKPAFLSGEQKKAIVDLLFKTNRKVTVKQLKEDYFKKIECFDSVEISGVEDRFNASLGTYHDLLKIIKDKDFLDNEENEDILEDIVLTLTLFEDREMIEERLKTYAHLFDDKVMKQLKRRRYTGWGRLSRKLINGIRDKQSGKTILDFLKSDGFANRNFMQLIHDDSLTFKEDIQKAQVSGQGDSLHEHIANLAGSPAIKKGILQTVKVVDELVKVMGRHKPENIVIEMARENQTTQKGQKNSRERMKRIEEGIKELGSQILKEHPVENTQLQNEKLYLYYLQNGRDMYVDQELDINRLSDYDVDHIVPQSFLKDDSIDNKVLTRSDKNRGKSDNVPSEEVVKKMKNYWRQLLNAKLITQRKFDNLTKAERGGLSELDKAGFIKRQLVETRQITKHVAQILDSRMNTKYDENDKLIREVKVITLKSKLVSDFRKDFQFYKVREINNYHHAHDAYLNAVVGTALIKKYPKLESEFVYGDYKVYDVRKMIAKSEQEIGKATAKYFFYSNIMNFFKTEITLANGEIRKRPLIETNGETGEIVWDKGRDFATVRKVLSMPQVNIVKKTEVQTGGFSKESILPKRNSDKLIARKKDWDPKKYGGFDSPTVAYSVLVVAKVEKGKSKKLKSVKELLGITIMERSSFEKNPIDFLEAKGYKEVKKDLIIKLPKYSLFELENGRKRMLASAGELQKGNELALPSKYVNFLYLASHYEKLKGSPEDNEQKQLFVEQHKHYLDEIIEQISEFSKRVILADANLDKVLSAYNKHRDKPIREQAENIIHLFTLTNLGAPAAFKYFDTTIDRKRYTSTKEVLDATLIHQSITGLYETRIDLSQLGGDEGADKRTADGSEFESPKKKRKV

SEQ ID NO: 1434 - protein, 1588 aa, Artificial Sequence
  Description of Artificial Sequence: Synthetic polypeptide
MSEVEFSHEYWMRHALTLAKRARDEREVPVGAVLVLNNRVIGEGWNRAIGLHDPTAHAEIMALRQGGLVMQNYRLYDATLYSTFEPCVMCAGAMIHSRIGRVVFGVRNAKTGAAGSLMDVLHHPGMNHRVEITEGILADECAALLCRFFRMPRRVFNAQKKAQSSTDSGGSSGGSSGSETPGTSESATPESSGGSSGGSDKKYSIGLAIGTNSVGWAVITDEYKVPSKKFKVLGNTDRHSIKKNLIGALLFDSGETAEATRLKRTARRRYTRRKNRICYLQEIFSNEMAKVDDSFFHRLEESFLVEEDKKHERHPIFGNIVDEVAYHEKYPTIYHLRKKLVDSTDKADLRLIYLALAHMIKFRGHFLIEGDLNPDNSDVDKLFIQLVQTYNQLFEENPINASGVDAKAILSARLSKSRRLENLIAQLPGEKKNGLFGNLIALSLGLTPNFKSNFDLAEDAKLQLSKDTYDDDLDNLLAQIGDQYADLFLAAKNLSDAILLSDILRVNTEITKAPLSASMIKRYDEHHQDLTLLKALVRQQLPEKYKEIFFDQSKNGYAGYIDGGASQEEFYKFIKPILEKMDGTEELLVKLNREDLLRKQRTFDNGSIPHQIHLGELHAILRRQEDFYPFLKDNREKIEKILTFRIPYYVGPLARGNSRFAWMTRKSEETITPWNFEEVVDKGASAQSFIERMTNFDKNLPNEKVLPKHSLLYEYFTVYNELTKVKYVTEGMRKPAFLSGEQKKAIVDLLFKTNRKVTVKQLKEDYFKKIECFDSVEISGVEDRFNASLGTYHDLLKIIKDKDFLDNEENEDILEDIVLTLTLFEDREMIEERLKTYAHLFDDKVMKQLKRRRYTGWGRLSRKLINGIRDKQSGKTILDFLKSDGFANRNFMQLIHDDSLTFKEDIQKAQVSGQGDSLHEHIANLAGSPAIKKGILQTVKVVDELVKVMGRHKPENIVIEMARENQTTQKGQKNSRERMKRIEEGIKELGSQILKEHPVENTQLQNEKLYLYYLQNGRDMYVDQELDINRLSDYDVDHIVPQSFLKDDSIDNKVLTRSDKNRGKSDNVPSEEVVKKMKNYWRQLLNAKLITQRKFDNLTKAERGGLSELDKAGFIKRQLVETRQITKHVAQILDSRMNTKYDENDKLIREVKVITLKSKLVSDFRKDFQFYKVREINNYHHAHDAYLNAVVGTALIKKYPKLESEFVYGDYKVYDVRKMIAKSEQEIGKATAKYFFYSNIMNFFKTEITLANGEIRKRPLIETNGETGEIVWDKGRDFATVRKVLSMPQVNIVKKTEVQTGGFSKESILPKRNSDKLIARKKDWDPKKYGGFDSPTVAYSVLVVAKVEKGKSKKLKSVKELLGITIMERSSFEKNPIDFLEAKGYKEVKKDLIIKLPKYSLFELENGRKRMLASAGELQKGNELALPSKYVNFLYLASHYEKLKGSPEDNEQKQLFVEQHKHYLDEIIEQISEFSKRVILADANLDKVLSAYNKHRDKPIREQAENIIHLFTLTNLGAPAAFKYFDTTIDRKRYTSTKEVLDATLIHQSITGLYETRIDLSQLGGDEGADKRTADGSEFESPKKKRKV

SEQ ID NO: 1435 - protein, 1786 aa, Artificial Sequence
  Description of Artificial Sequence: Synthetic polypeptide
MSEVEFSHEYWMRHALTLAKRAWDEREVPVGAVLVHNNRVIGEGWNRPIGRHDPTAHAEIMALRQGGLVMQNYRLIDATLYVTLEPCVMCAGAMIHSRIGRVVFGARDAKTGAAGSLMDVLHHPGMNHRVEITEGILADECAALLSDFFRMRRQEIKAQKKAQSSTDSGGSSGGSSGSETPGTSESATPESSGGSSGGSSEVEFSHEYWMRHALTLAKRARDEREVPVGAVLVLNNRVIGEGWNRAIGLHDPTAHAEIMALRQGGLVMQNYRLYDATLYSTFEPCVMCAGAMIHSRIGRVVFGVRNAKTGAAGSLMDVLHHPGMNHRVEITEGILADECAALLCRFFRMPRRVFNAQKKAQSSTDSGGSSGGSSGSETPGTSESATPESSGGSSGGSDKKYSIGLAIGTNSVGWAVITDEYKVPSKKFKVLGNTDRHSIKKNLIGALLFDSGETAEATRLKRTARRRYTRRKNRICYLQEIFSNEMAKVDDSFFHRLEESFLVEEDKKHERHPIFGNIVDEVAYHEKYPTIYHLRKKLVDSTDKADLRLIYLALAHMIKFRGHFLIEGDLNPDNSDVDKLFIQLVQTYNQLFEENPINASGVDAKAILSARLSKSRRLENLIAQLPGEKKNGLFGNLIALSLGLTPNFKSNFDLAEDAKLQLSKDTYDDDLDNLLAQIGDQYADLFLAAKNLSDAILLSDILRVNTEITKAPLSASMIKRYDEHHQDLTLLKALVRQQLPEKYKEIFFDQSKNGYAGYIDGGASQEEFYKFIKPILEKMDGTEELLVKLNREDLLRKQRTFDNGSIPHQIHLGELHAILRRQEDFYPFLKDNREKIEKILTFRIPYYVGPLARGNSRFAWMTRKSEETITPWNFEEVVDKGASAQSFIERMTNFDKNLPNEKVLPKHSLLYEYFTVYNELTKVKYVTEGMRKPAFLSGEQKKAIVDLLFKTNRKVTVKQLKEDYFKKIECFDSVEISGVEDRFNASLGTYHDLLKIIKDKDFLDNEENEDILEDIVLTLTLFEDREMIEERLKTYAHLFDDKVMKQLKRRRYTGWGRLSRKLINGIRDKQSGKTILDFLKSDGFANRNFMQLIHDDSLTFKEDIQKAQVSGQGDSLHEHIANLAGSPAIKKGILQTVKVVDELVKVMGRHKPENIVIEMARENQTTQKGQKNSRERMKRIEEGIKELGSQILKEHPVENTQLQNEKLYLYYLQNGRDMYVDQELDINRLSDYDVDHIVPQSFLKDDSIDNKVLTRSDKNRGKSDNVPSEEVVKKMKNYWRQLLNAKLITQRKFDNLTKAERGGLSELDKAGFIKRQLVETRQITKHVAQILDSRMNTKYDENDKLIREVKVITLKSKLVSDFRKDFQFYKVREINNYHHAHDAYLNAVVGTALIKKYPKLESEFVYGDYKVYDVRKMIAKSEQEIGKATAKYFFYSNIMNFFKTEITLANGEIRKRPLIETNGETGEIVWDKGRDFATVRKVLSMPQVNIVKKTEVQTGGFSKESILPKRNSDKLIARKKDWDPKKYGGFDSPTVAYSVLVVAKVEKGKSKKLKSVKELLGITIMERSSFEKNPIDFLEAKGYKEVKKDLIIKLPKYSLFELENGRKRMLASAGELQKGNELALPSKYVNFLYLASHYEKLKGSPEDNEQKQLFVEQHKHYLDEIIEQISEFSKRVILADANLDKVLSAYNKHRDKPIREQAENIIHLFTLTNLGAPAAFKYFDTTIDRKRYTSTKEVLDATLIHQSITGLYETRIDLSQLGGDEGADKRTADGSEFESPKKKRKV

SEQ ID NO: 1436 - protein, 1588 aa, Artificial Sequence
  Description of Artificial Sequence: Synthetic polypeptide
MSEVEFSHEYWMRHALTLAKRARDEREVPVGAVLVLNNRVIGEGWNRAIGLHDPTAHAEIMALRQGGLVMQNYRLIDATLYVTFEPCVMCAGAMIHSRIGRVVFGVRNAKTGAAGSLMDVLHYPGMNHRVEITEGILADECAALLCTFFRMPRQVFNAQKKAQSSTDSGGSSGGSSGSETPGTSESATPESSGGSSGGSDKKYSIGLAIGTNSVGWAVITDEYKVPSKKFKVLGNTDRHSIKKNLIGALLFDSGETAEATRLKRTARRRYTRRKNRICYLQEIFSNEMAKVDDSFFHRLEESFLVEEDKKHERHPIFGNIVDEVAYHEKYPTIYHLRKKLVDSTDKADLRLIYLALAHMIKFRGHFLIEGDLNPDNSDVDKLFIQLVQTYNQLFEENPINASGVDAKAILSARLSKSRRLENLIAQLPGEKKNGLFGNLIALSLGLTPNFKSNFDLAEDAKLQLSKDTYDDDLDNLLAQIGDQYADLFLAAKNLSDAILLSDILRVNTEITKAPLSASMIKRYDEHHQDLTLLKALVRQQLPEKYKEIFFDQSKNGYAGYIDGGASQEEFYKFIKPILEKMDGTEELLVKLNREDLLRKQRTFDNGSIPHQIHLGELHAILRRQEDFYPFLKDNREKIEKILTFRIPYYVGPLARGNSRFAWMTRKSEETITPWNFEEVVDKGASAQSFIERMTNFDKNLPNEKVLPKHSLLYEYFTVYNELTKVKYVTEGMRKPAFLSGEQKKAIVDLLFKTNRKVTVKQLKEDYFKKIECFDSVEISGVEDRFNASLGTYHDLLKIIKDKDFLDNEENEDILEDIVLTLTLFEDREMIEERLKTYAHLFDDKVMKQLKRRRYTGWGRLSRKLINGIRDKQSGKTILDFLKSDGFANRNFMQLIHDDSLTFKEDIQKAQVSGQGDSLHEHIANLAGSPAIKKGILQTVKVVDELVKVMGRHKPENIVIEMARENQTTQKGQKNSRERMKRIEEGIKELGSQILKEHPVENTQLQNEKLYLYYLQNGRDMYVDQELDINRLSDYDVDHIVPQSFLKDDSIDNKVLTRSDKNRGKSDNVPSEEVVKKMKNYWRQLLNAKLITQRKFDNLTKAERGGLSELDKAGFIKRQLVETRQITKHVAQILDSRMNTKYDENDKLIREVKVITLKSKLVSDFRKDFQFYKVREINNYHHAHDAYLNAVVGTALIKKYPKLESEFVYGDYKVYDVRKMIAKSEQEIGKATAKYFFYSNIMNFFKTEITLANGEIRKRPLIETNGETGEIVWDKGRDFATVRKVLSMPQVNIVKKTEVQTGGFSKESILPKRNSDKLIARKKDWDPKKYGGFVSPTVAYSVLVVAKVEKGKSKKLKSVKELLGITIMERSSFEKNPIDFLEAKGYKEVKKDLIIKLPKYSLFELENGRKRMLASARELQKGNELALPSKYVNFLYLASHYEKLKGSPEDNEQKQLFVEQHKHYLDEIIEQISEFSKRVILADANLDKVLSAYNKHRDKPIREQAENIIHLFTLTNLGAPAAFKYFDTTIDRKQYRSTKEVLDATLIHQSITGLYETRIDLSQLGGDEGADKRTADGSEFESPKKKRKV

SEQ ID NO: 1437 - protein, 1588 aa, Artificial Sequence
  Description of Artificial Sequence: Synthetic polypeptide
MSEVEFSHEYWMRHALTLAKRARDEREVPVGAVLVLNNRVIGEGWNRAIGLHDPTAHAEIMALRQGGLVMQNYRLIDATLYVTFEPCVMCAGAMIHSRIGRVVFGVRNAKTGAAGSLMDVLHYPGMNHRVEITEGILADECAALLCRFFRMPRQVFNAQKKAQSSTDSGGSSGGSSGSETPGTSESATPESSGGSSGGSDKKYSIGLAIGTNSVGWAVITDEYKVPSKKFKVLGNTDRHSIKKNLIGALLFDSGETAEATRLKRTARRRYTRRKNRICYLQEIFSNEMAKVDDSFFHRLEESFLVEEDKKHERHPIFGNIVDEVAYHEKYPTIYHLRKKLVDSTDKADLRLIYLALAHMIKFRGHFLIEGDLNPDNSDVDKLFIQLVQTYNQLFEENPINASGVDAKAILSARLSKSRRLENLIAQLPGEKKNGLFGNLIALSLGLTPNFKSNFDLAEDAKLQLSKDTYDDDLDNLLAQIGDQYADLFLAAKNLSDAILLSDILRVNTEITKAPLSASMIKRYDEHHQDLTLLKALVRQQLPEKYKEIFFDQSKNGYAGYIDGGASQEEFYKFIKPILEKMDGTEELLVKLNREDLLRKQRTFDNGSIPHQIHLGELHAILRRQEDFYPFLKDNREKIEKILTFRIPYYVGPLARGNSRFAWMTRKSEETITPWNFEEVVDKGASAQSFIERMTNFDKNLPNEKVLPKHSLLYEYFTVYNELTKVKYVTEGMRKPAFLSGEQKKAIVDLLFKTNRKVTVKQLKEDYFKKIECFDSVEISGVEDRFNASLGTYHDLLKIIKDKDFLDNEENEDILEDIVLTLTLFEDREMIEERLKTYAHLFDDKVMKQLKRRRYTGWGRLSRKLINGIRDKQSGKTILDFLKSDGFANRNFMQLIHDDSLTFKEDIQKAQVSGQGDSLHEHIANLAGSPAIKKGILQTVKVVDELVKVMGRHKPENIVIEMARENQTTQKGQKNSRERMKRIEEGIKELGSQILKEHPVENTQLQNEKLYLYYLQNGRDMYVDQELDINRLSDYDVDHIVPQSFLKDDSIDNKVLTRSDKNRGKSDNVPSEEVVKKMKNYWRQLLNAKLITQRKFDNLTKAERGGLSELDKAGFIKRQLVETRQITKHVAQILDSRMNTKYDENDKLIREVKVITLKSKLVSDFRKDFQFYKVREINNYHHAHDAYLNAVVGTALIKKYPKLESEFVYGDYKVYDVRKMIAKSEQEIGKATAKYFFYSNIMNFFKTEITLANGEIRKRPLIETNGETGEIVWDKGRDFATVRKVLSMPQVNIVKKTEVQTGGFSKESILPKRNSDKLIARKKDWDPKKYGGFVSPTVAYSVLVVAKVEKGKSKKLKSVKELLGITIMERSSFEKNPIDFLEAKGYKEVKKDLIIKLPKYSLFELENGRKRMLASARELQKGNELALPSKYVNFLYLASHYEKLKGSPEDNEQKQLFVEQHKHYLDEIIEQISEFSKRVILADANLDKVLSAYNKHRDKPIREQAENIIHLFTLTNLGAPAAFKYFDTTIDRKQYRSTKEVLDATLIHQSITGLYETRIDLSQLGGDEGADKRTADGSEFESPKKKRKV

SEQ ID NO: 1438 - protein, 1588 aa, Artificial Sequence
  Description of Artificial Sequence: Synthetic polypeptide
MSEVEFSHEYWMRHALTLAKRARDEREVPVGAVLVLNNRVIGEGWNRAIGLHDPTAHAEIMALRQGGLVMQNYRLIDATLYVTFEPCVMCAGAMIHSRIGRVVFGVRNAKTGAAGSLMDVLHYPGMNHRVEITEGILADECAALLCYFFRMPRSVFNAQKKAQSSTDSGGSSGGSSGSETPGTSESATPESSGGSSGGSDKKYSIGLAIGTNSVGWAVITDEYKVPSKKFKVLGNTDRHSIKKNLIGALLFDSGETAEATRLKRTARRRYTRRKNRICYLQEIFSNEMAKVDDSFFHRLEESFLVEEDKKHERHPIFGNIVDEVAYHEKYPTIYHLRKKLVDSTDKADLRLIYLALAHMIKFRGHFLIEGDLNPDNSDVDKLFIQLVQTYNQLFEENPINASGVDAKAILSARLSKSRRLENLIAQLPGEKKNGLFGNLIALSLGLTPNFKSNFDLAEDAKLQLSKDTYDDDLDNLLAQIGDQYADLFLAAKNLSDAILLSDILRVNTEITKAPLSASMIKRYDEHHQDLTLLKALVRQQLPEKYKEIFFDQSKNGYAGYIDGGASQEEFYKFIKPILEKMDGTEELLVKLNREDLLRKQRTFDNGSIPHQIHLGELHAILRRQEDFYPFLKDNREKIEKILTFRIPYYVGPLARGNSRFAWMTRKSEETITPWNFEEVVDKGASAQSFIERMTNFDKNLPNEKVLPKHSLLYEYFTVYNELTKVKYVTEGMRKPAFLSGEQKKAIVDLLFKTNRKVTVKQLKEDYFKKIECFDSVEISGVEDRFNASLGTYHDLLKIIKDKDFLDNEENEDILEDIVLTLTLFEDREMIEERLKTYAHLFDDKVMKQLKRRRYTGWGRLSRKLINGIRDKQSGKTILDFLKSDGFANRNFMQLIHDDSLTFKEDIQKAQVSGQGDSLHEHIANLAGSPAIKKGILQTVKVVDELVKVMGRHKPENIVIEMARENQTTQKGQKNSRERMKRIEEGIKELGSQILKEHPVENTQLQNEKLYLYYLQNGRDMYVDQELDINRLSDYDVDHIVPQSFLKDDSIDNKVLTRSDKNRGKSDNVPSEEVVKKMKNYWRQLLNAKLITQRKFDNLTKAERGGLSELDKAGFIKRQLVETRQITKHVAQILDSRMNTKYDENDKLIREVKVITLKSKLVSDFRKDFQFYKVREINNYHHAHDAYLNAVVGTALIKKYPKLESEFVYGDYKVYDVRKMIAKSEQEIGKATAKYFFYSNIMNFFKTEITLANGEIRKRPLIETNGETGEIVWDKGRDFATVRKVLSMPQVNIVKKTEVQTGGFSKESILPKRNSDKLIARKKDWDPKKYGGFVSPTVAYSVLVVAKVEKGKSKKLKSVKELLGITIMERSSFEKNPIDFLEAKGYKEVKKDLIIKLPKYSLFELENGRKRMLASARELQKGNELALPSKYVNFLYLASHYEKLKGSPEDNEQKQLFVEQHKHYLDEIIEQISEFSKRVILADANLDKVLSAYNKHRDKPIREQAENIIHLFTLTNLGAPAAFKYFDTTIDRKQYRSTKEVLDATLIHQSITGLYETRIDLSQLGGDEGADKRTADGSEFESPKKKRKV

SEQ ID NO: 1439 - protein, 1588 aa, Artificial Sequence
  Description of Artificial Sequence: Synthetic polypeptide
MSEVEFSHEYWMRHALTLAKRARDEREVPVGAVLVLNNRVIGEGWNRAIGLHDPTAHAEIMALRQGGLVMQNYRLIDATLYVTFEPCVMCAGAMIHSRIGRVVFGVRNAKTGAAGSLMDVLHHPGMNHRVEITEGILADECAALLCYFFRMPRQVFNAQKKAQSSTDSGGSSGGSSGSETPGTSESATPESSGGSSGGSDKKYSIGLAIGTNSVGWAVITDEYKVPSKKFKVLGNTDRHSIKKNLIGALLFDSGETAEATRLKRTARRRYTRRKNRICYLQEIFSNEMAKVDDSFFHRLEESFLVEEDKKHERHPIFGNIVDEVAYHEKYPTIYHLRKKLVDSTDKADLRLIYLALAHMIKFRGHFLIEGDLNPDNSDVDKLFIQLVQTYNQLFEENPINASGVDAKAILSARLSKSRRLENLIAQLPGEKKNGLFGNLIALSLGLTPNFKSNFDLAEDAKLQLSKDTYDDDLDNLLAQIGDQYADLFLAAKNLSDAILLSDILRVNTEITKAPLSASMIKRYDEHHQDLTLLKALVRQQLPEKYKEIFFDQSKNGYAGYIDGGASQEEFYKFIKPILEKMDGTEELLVKLNREDLLRKQRTFDNGSIPHQIHLGELHAILRRQEDFYPFLKDNREKIEKILTFRIPYYVGPLARGNSRFAWMTRKSEETITPWNFEEVVDKGASAQSFIERMTNFDKNLPNEKVLPKHSLLYEYFTVYNELTKVKYVTEGMRKPAFLSGEQKKAIVDLLFKTNRKVTVKQLKEDYFKKIECFDSVEISGVEDRFNASLGTYHDLLKIIKDKDFLDNEENEDILEDIVLTLTLFEDREMIEERLKTYAHLFDDKVMKQLKRRRYTGWGRLSRKLINGIRDKQSGKTILDFLKSDGFANRNFMQLIHDDSLTFKEDIQKAQVSGQGDSLHEHIANLAGSPAIKKGILQTVKVVDELVKVMGRHKPENIVIEMARENQTTQKGQKNSRERMKRIEEGIKELGSQILKEHPVENTQLQNEKLYLYYLQNGRDMYVDQELDINRLSDYDVDHIVPQSFLKDDSIDNKVLTRSDKNRGKSDNVPSEEVVKKMKNYWRQLLNAKLITQRKFDNLTKAERGGLSELDKAGFIKRQLVETRQITKHVAQILDSRMNTKYDENDKLIREVKVITLKSKLVSDFRKDFQFYKVREINNYHHAHDAYLNAVVGTALIKKYPKLESEFVYGDYKVYDVRKMIAKSEQEIGKATAKYFFYSNIMNFFKTEITLANGEIRKRPLIETNGETGEIVWDKGRDFATVRKVLSMPQVNIVKKTEVQTGGFSKESILPKRNSDKLIARKKDWDPKKYGGFVSPTVAYSVLVVAKVEKGKSKKLKSVKELLGITIMERSSFEKNPIDFLEAKGYKEVKKDLIIKLPKYSLFELENGRKRMLASARELQKGNELALPSKYVNFLYLASHYEKLKGSPEDNEQKQLFVEQHKHYLDEIIEQISEFSKRVILADANLDKVLSAYNKHRDKPIREQAENIIHLFTLTNLGAPAAFKYFDTTIDRKQYRSTKEVLDATLIHQSITGLYETRIDLSQLGGDEGADKRTADGSEFESPKKKRKV

SEQ ID NO: 1440 - protein, 1588 aa, Artificial Sequence
  Description of Artificial Sequence: Synthetic polypeptide
MSEVEFSHEYWMRHALTLAKRARDEREVPVGAVLVLNNRVIGEGWNRAIGLHDPTAHAEIMALRQGGLVMQNYRLIDATLYSTFEPCVMCAGAMIHSRIGRVVFGVRNAKTGAAGSLMDVLHYPGMNHRVEITEGILADECAALLCYFFRMPRQVFNAQKKAQSSTDSGGSSGGSSGSETPGTSESATPESSGGSSGGSDKKYSIGLAIGTNSVGWAVITDEYKVPSKKFKVLGNTDRHSIKKNLIGALLFDSGETAEATRLKRTARRRYTRRKNRICYLQEIFSNEMAKVDDSFFHRLEESFLVEEDKKHERHPIFGNIVDEVAYHEKYPTIYHLRKKLVDSTDKADLRLIYLALAHMIKFRGHFLIEGDLNPDNSDVDKLFIQLVQTYNQLFEENPINASGVDAKAILSARLSKSRRLENLIAQLPGEKKNGLFGNLIALSLGLTPNFKSNFDLAEDAKLQLSKDTYDDDLDNLLAQIGDQYADLFLAAKNLSDAILLSDILRVNTEITKAPLSASMIKRYDEHHQDLTLLKALVRQQLPEKYKEIFFDQSKNGYAGYIDGGASQEEFYKFIKPILEKMDGTEELLVKLNREDLLRKQRTFDNGSIPHQIHLGELHAILRRQEDFYPFLKDNREKIEKILTFRIPYYVGPLARGNSRFAWMTRKSEETITPWNFEEVVDKGASAQSFIERMTNFDKNLPNEKVLPKHSLLYEYFTVYNELTKVKYVTEGMRKPAFLSGEQKKAIVDLLFKTNRKVTVKQLKEDYFKKIECFDSVEISGVEDRFNASLGTYHDLLKIIKDKDFLDNEENEDILEDIVLTLTLFEDREMIEERLKTYAHLFDDKVMKQLKRRRYTGWGRLSRKLINGIRDKQSGKTILDFLKSDGFANRNFMQLIHDDSLTFKEDIQKAQVSGQGDSLHEHIANLAGSPAIKKGILQTVKVVDELVKVMGRHKPENIVIEMARENQTTQKGQKNSRERMKRIEEGIKELGSQILKEHPVENTQLQNEKLYLYYLQNGRDMYVDQELDINRLSDYDVDHIVPQSFLKDDSIDNKVLTRSDKNRGKSDNVPSEEVVKKMKNYWRQLLNAKLITQRKFDNLTKAERGGLSELDKAGFIKRQLVETRQITKHVAQILDSRMNTKYDENDKLIREVKVITLKSKLVSDFRKDFQFYKVREINNYHHAHDAYLNAVVGTALIKKYPKLESEFVYGDYKVYDVRKMIAKSEQEIGKATAKYFFYSNIMNFFKTEITLANGEIRKRPLIETNGETGEIVWDKGRDFATVRKVLSMPQVNIVKKTEVQTGGFSKESILPKRNSDKLIARKKDWDPKKYGGFVSPTVAYSVLVVAKVEKGKSKKLKSVKELLGITIMERSSFEKNPIDFLEAKGYKEVKKDLIIKLPKYSLFELENGRKRMLASARELQKGNELALPSKYVNFLYLASHYEKLKGSPEDNEQKQLFVEQHKHYLDEIIEQISEFSKRVILADANLDKVLSAYNKHRDKPIREQAENIIHLFTLTNLGAPAAFKYFDTTIDRKQYRSTKEVLDATLIHQSITGLYETRIDLSQLGGDEGADKRTADGSEFESPKKKRKV

SEQ ID NO: 1441 - protein, 1588 aa, Artificial Sequence
  Description of Artificial Sequence: Synthetic polypeptide
MSEVEFSHEYWMRHALTLAKRARDEREVPVGAVLVLNNRVIGEGWNRAIGLHDPTAHAEIMALRQGGLVMQNYRLIDATLYVTFEPCVMCAGAMIHSRIGRVVFGVRNAKTGAAGSLMDVLHYPGMNHRVEITEGILADECAALLCYFFRMPRQVFNAQKKAQSSRDSGGSSGGSSGSETPGTSESATPESSGGSSGGSDKKYSIGLAIGTNSVGWAVITDEYKVPSKKFKVLGNTDRHSIKKNLIGALLFDSGETAEATRLKRTARRRYTRRKNRICYLQEIFSNEMAKVDDSFFHRLEESFLVEEDKKHERHPIFGNIVDEVAYHEKYPTIYHLRKKLVDSTDKADLRLIYLALAHMIKFRGHFLIEGDLNPDNSDVDKLFIQLVQTYNQLFEENPINASGVDAKAILSARLSKSRRLENLIAQLPGEKKNGLFGNLIALSLGLTPNFKSNFDLAEDAKLQLSKDTYDDDLDNLLAQIGDQYADLFLAAKNLSDAILLSDILRVNTEITKAPLSASMIKRYDEHHQDLTLLKALVRQQLPEKYKEIFFDQSKNGYAGYIDGGASQEEFYKFIKPILEKMDGTEELLVKLNREDLLRKQRTFDNGSIPHQIHLGELHAILRRQEDFYPFLKDNREKIEKILTFRIPYYVGPLARGNSRFAWMTRKSEETITPWNFEEVVDKGASAQSFIERMTNFDKNLPNEKVLPKHSLLYEYFTVYNELTKVKYVTEGMRKPAFLSGEQKKAIVDLLFKTNRKVTVKQLKEDYFKKIECFDSVEISGVEDRFNASLGTYHDLLKIIKDKDFLDNEENEDILEDIVLTLTLFEDREMIEERLKTYAHLFDDKVMKQLKRRRYTGWGRLSRKLINGIRDKQSGKTILDFLKSDGFANRNFMQLIHDDSLTFKEDIQKAQVSGQGDSLHEHIANLAGSPAIKKGILQTVKVVDELVKVMGRHKPENIVIEMARENQTTQKGQKNSRERMKRIEEGIKELGSQILKEHPVENTQLQNEKLYLYYLQNGRDMYVDQELDINRLSDYDVDHIVPQSFLKDDSIDNKVLTRSDKNRGKSDNVPSEEVVKKMKNYWRQLLNAKLITQRKFDNLTKAERGGLSELDKAGFIKRQLVETRQITKHVAQILDSRMNTKYDENDKLIREVKVITLKSKLVSDFRKDFQFYKVREINNYHHAHDAYLNAVVGTALIKKYPKLESEFVYGDYKVYDVRKMIAKSEQEIGKATAKYFFYSNIMNFFKTEITLANGEIRKRPLIETNGETGEIVWDKGRDFATVRKVLSMPQVNIVKKTEVQTGGFSKESILPKRNSDKLIARKKDWDPKKYGGFVSPTVAYSVLVVAKVEKGKSKKLKSVKELLGITIMERSSFEKNPIDFLEAKGYKEVKKDLIIKLPKYSLFELENGRKRMLASARELQKGNELALPSKYVNFLYLASHYEKLKGSPEDNEQKQLFVEQHKHYLDEIIEQISEFSKRVILADANLDKVLSAYNKHRDKPIREQAENIIHLFTLTNLGAPAAFKYFDTTIDRKQYRSTKEVLDATLIHQSITGLYETRIDLSQLGGDEGADKRTADGSEFESPKKKRKV

SEQ ID NO: 1442 - protein, 1588 aa, Artificial Sequence
  Description of Artificial Sequence: Synthetic polypeptide
MSEVEFSHEYWMRHALTLAKRARDEREVPVGAVLVLNNRVIGEGWNRAIGLHDPTAHAEIMALRQGGLVMQNYRLIDATLYVTFEPCVMCAGAMIHSRIGRVVFGVRNAKTGAAGSLMDVLHYPGMNHRVEITEGILADECAALLCYFFRMPRRVFNAQKKAQSSTDSGGSSGGSSGSETPGTSESATPESSGGSSGGSDKKYSIGLAIGTNSVGWAVITDEYKVPSKKFKVLGNTDRHSIKKNLIGALLFDSGETAEATRLKRTARRRYTRRKNRICYLQEIFSNEMAKVDDSFFHRLEESFLVEEDKKHERHPIFGNIVDEVAYHEKYPTIYHLRKKLVDSTDKADLRLIYLALAHMIKFRGHFLIEGDLNPDNSDVDKLFIQLVQTYNQLFEENPINASGVDAKAILSARLSKSRRLENLIAQLPGEKKNGLFGNLIALSLGLTPNFKSNFDLAEDAKLQLSKDTYDDDLDNLLAQIGDQYADLFLAAKNLSDAILLSDILRVNTEITKAPLSASMIKRYDEHHQDLTLLKALVRQQLPEKYKEIFFDQSKNGYAGYIDGGASQEEFYKFIKPILEKMDGTEELLVKLNREDLLRKQRTFDNGSIPHQIHLGELHAILRRQEDFYPFLKDNREKIEKILTFRIPYYVGPLARGNSRFAWMTRKSEETITPWNFEEVVDKGASAQSFIERMTNFDKNLPNEKVLPKHSLLYEYFTVYNELTKVKYVTEGMRKPAFLSGEQKKAIVDLLFKTNRKVTVKQLKEDYFKKIECFDSVEISGVEDRFNASLGTYHDLLKIIKDKDFLDNEENEDILEDIVLTLTLFEDREMIEERLKTYAHLFDDKVMKQLKRRRYTGWGRLSRKLINGIRDKQSGKTILDFLKSDGFANRNFMQLIHDDSLTFKEDIQKAQVSGQGDSLHEHIANLAGSPAIKKGILQTVKVVDELVKVMGRHKPENIVIEMARENQTTQKGQKNSRERMKRIEEGIKELGSQILKEHPVENTQLQNEKLYLYYLQNGRDMYVDQELDINRLSDYDVDHIVPQSFLKDDSIDNKVLTRSDKNRGKSDNVPSEEVVKKMKNYWRQLLNAKLITQRKFDNLTKAERGGLSELDKAGFIKRQLVETRQITKHVAQILDSRMNTKYDENDKLIREVKVITLKSKLVSDFRKDFQFYKVREINNYHHAHDAYLNAVVGTALIKKYPKLESEFVYGDYKVYDVRKMIAKSEQEIGKATAKYFFYSNIMNFFKTEITLANGEIRKRPLIETNGETGEIVWDKGRDFATVRKVLSMPQVNIVKKTEVQTGGFSKESILPKRNSDKLIARKKDWDPKKYGGFVSPTVAYSVLVVAKVEKGKSKKLKSVKELLGITIMERSSFEKNPIDFLEAKGYKEVKKDLIIKLPKYSLFELENGRKRMLASARELQKGNELALPSKYVNFLYLASHYEKLKGSPEDNEQKQLFVEQHKHYLDEIIEQISEFSKRVILADANLDKVLSAYNKHRDKPIREQAENIIHLFTLTNLGAPAAFKYFDTTIDRKQYRSTKEVLDATLIHQSITGLYETRIDLSQLGGDEGADKRTADGSEFESPKKKRKV

SEQ ID NO: 1443 - protein, 1588 aa, Artificial Sequence
  Description of Artificial Sequence: Synthetic polypeptide
MSEVEFSHEYWMRHALTLAKRARDEREVPVGAVLVLNNRVIGEGWNRAIGLHDPTAHAEIMALRQGGLVMQNYRLIDATLYVTFEPCVMCAGAMIHSRIGRVVFGVRNAKTGAAGSLMDVLHHPGMNHRVEITEGILADECAALLCRFFRMPRRVFNAQKKAQSSTDSGGSSGGSSGSETPGTSESATPESSGGSSGGSDKKYSIGLAIGTNSVGWAVITDEYKVPSKKFKVLGNTDRHSIKKNLIGALLFDSGETAEATRLKRTARRRYTRRKNRICYLQEIFSNEMAKVDDSFFHRLEESFLVEEDKKHERHPIFGNIVDEVAYHEKYPTIYHLRKKLVDSTDKADLRLIYLALAHMIKFRGHFLIEGDLNPDNSDVDKLFIQLVQTYNQLFEENPINASGVDAKAILSARLSKSRRLENLIAQLPGEKKNGLFGNLIALSLGLTPNFKSNFDLAEDAKLQLSKDTYDDDLDNLLAQIGDQYADLFLAAKNLSDAILLSDILRVNTEITKAPLSASMIKRYDEHHQDLTLLKALVRQQLPEKYKEIFFDQSKNGYAGYIDGGASQEEFYKFIKPILEKMDGTEELLVKLNREDLLRKQRTFDNGSIPHQIHLGELHAILRRQEDFYPFLKDNREKIEKILTFRIPYYVGPLARGNSRFAWMTRKSEETITPWNFEEVVDKGASAQSFIERMTNFDKNLPNEKVLPKHSLLYEYFTVYNELTKVKYVTEGMRKPAFLSGEQKKAIVDLLFKTNRKVTVKQLKEDYFKKIECFDSVEISGVEDRFNASLGTYHDLLKIIKDKDFLDNEENEDILEDIVLTLTLFEDREMIEERLKTYAHLFDDKVMKQLKRRRYTGWGRLSRKLINGIRDKQSGKTILDFLKSDGFANRNFMQLIHDDSLTFKEDIQKAQVSGQGDSLHEHIANLAGSPAIKKGILQTVKVVDELVKVMGRHKPENIVIEMARENQTTQKGQKNSRERMKRIEEGIKELGSQILKEHPVENTQLQNEKLYLYYLQNGRDMYVDQELDINRLSDYDVDHIVPQSFLKDDSIDNKVLTRSDKNRGKSDNVPSEEVVKKMKNYWRQLLNAKLITQRKFDNLTKAERGGLSELDKAGFIKRQLVETRQITKHVAQILDSRMNTKYDENDKLIREVKVITLKSKLVSDFRKDFQFYKVREINNYHHAHDAYLNAVVGTALIKKYPKLESEFVYGDYKVYDVRKMIAKSEQEIGKATAKYFFYSNIMNFFKTEITLANGEIRKRPLIETNGETGEIVWDKGRDFATVRKVLSMPQVNIVKKTEVQTGGFSKESILPKRNSDKLIARKKDWDPKKYGGFVSPTVAYSVLVVAKVEKGKSKKLKSVKELLGITIMERSSFEKNPIDFLEAKGYKEVKKDLIIKLPKYSLFELENGRKRMLASARELQKGNELALPSKYVNFLYLASHYEKLKGSPEDNEQKQLFVEQHKHYLDEIIEQISEFSKRVILADANLDKVLSAYNKHRDKPIREQAENIIHLFTLTNLGAPAAFKYFDTTIDRKQYRSTKEVLDATLIHQSITGLYETRIDLSQLGGDEGADKRTADGSEFESPKKKRKV

SEQ ID NO: 1444 - protein, 1588 aa, Artificial Sequence
  Description of Artificial Sequence: Synthetic polypeptide
MSEVEFSHEYWMRHALTLAKRARDEREVPVGAVLVLNNRVIGEGWNRAIGLHDPTAHAEIMALRQGGLVMQNYRLYDATLYVTFEPCVMCAGAMIHSRIGRVVFGVRNAKTGAAGSLMDVLHYPGMNHRVEITEGILADECAALLCRFFRMPRRVFNAQKKAQSSTDSGGSSGGSSGSETPGTSESATPESSGGSSGGSDKKYSIGLAIGTNSVGWAVITDEYKVPSKKFKVLGNTDRHSIKKNLIGALLFDSGETAEATRLKRTARRRYTRRKNRICYLQEIFSNEMAKVDDSFFHRLEESFLVEEDKKHERHPIFGNIVDEVAYHEKYPTIYHLRKKLVDSTDKADLRLIYLALAHMIKFRGHFLIEGDLNPDNSDVDKLFIQLVQTYNQLFEENPINASGVDAKAILSARLSKSRRLENLIAQLPGEKKNGLFGNLIALSLGLTPNFKSNFDLAEDAKLQLSKDTYDDDLDNLLAQIGDQYADLFLAAKNLSDAILLSDILRVNTEITKAPLSASMIKRYDEHHQDLTLLKALVRQQLPEKYKEIFFDQSKNGYAGYIDGGASQEEFYKFIKPILEKMDGTEELLVKLNREDLLRKQRTFDNGSIPHQIHLGELHAILRRQEDFYPFLKDNREKIEKILTFRIPYYVGPLARGNSRFAWMTRKSEETITPWNFEEVVDKGASAQSFIERMTNFDKNLPNEKVLPKHSLLYEYFTVYNELTKVKYVTEGMRKPAFLSGEQKKAIVDLLFKTNRKVTVKQLKEDYFKKIECFDSVEISGVEDRFNASLGTYHDLLKIIKDKDFLDNEENEDILEDIVLTLTLFEDREMIEERLKTYAHLFDDKVMKQLKRRRYTGWGRLSRKLINGIRDKQSGKTILDFLKSDGFANRNFMQLIHDDSLTFKEDIQKAQVSGQGDSLHEHIANLAGSPAIKKGILQTVKVVDELVKVMGRHKPENIVIEMARENQTTQKGQKNSRERMKRIEEGIKELGSQILKEHPVENTQLQNEKLYLYYLQNGRDMYVDQELDINRLSDYDVDHIVPQSFLKDDSIDNKVLTRSDKNRGKSDNVPSEEVVKKMKNYWRQLLNAKLITQRKFDNLTKAERGGLSELDKAGFIKRQLVETRQITKHVAQILDSRMNTKYDENDKLIREVKVITLKSKLVSDFRKDFQFYKVREINNYHHAHDAYLNAVVGTALIKKYPKLESEFVYGDYKVYDVRKMIAKSEQEIGKATAKYFFYSNIMNFFKTEITLANGEIRKRPLIETNGETGEIVWDKGRDFATVRKVLSMPQVNIVKKTEVQTGGFSKESILPKRNSDKLIARKKDWDPKKYGGFVSPTVAYSVLVVAKVEKGKSKKLKSVKELLGITIMERSSFEKNPIDFLEAKGYKEVKKDLIIKLPKYSLFELENGRKRMLASARELQKGNELALPSKYVNFLYLASHYEKLKGSPEDNEQKQLFVEQHKHYLDEIIEQISEFSKRVILADANLDKVLSAYNKHRDKPIREQAENIIHLFTLTNLGAPAAFKYFDTTIDRKQYRSTKEVLDATLIHQSITGLYETRIDLSQLGGDEGADKRTADGSEFESPKKKRKV

SEQ ID NO: 1445 - protein, 1588 aa, Artificial Sequence
  Description of Artificial Sequence: Synthetic polypeptide
MSEVEFSHEYWMRHALTLAKRARDEREVPVGAVLVLNNRVIGEGWNRAIGLHDPTAHAEIMALRQGGLVMQNYRLIDATLYVTFEPCVMCAGAMIHSRIGRVVFGVRNAKTGAAGSLMDVLHYPGMNHRVEITEGILADECAALLCRFFRMPRRVFNAQKKAQSSRDSGGSSGGSSGSETPGTSESATPESSGGSSGGSDKKYSIGLAIGTNSVGWAVITDEYKVPSKKFKVLGNTDRHSIKKNLIGALLFDSGETAEATRLKRTARRRYTRRKNRICYLQEIFSNEMAKVDDSFFHRLEESFLVEEDKKHERHPIFGNIVDEVAYHEKYPTIYHLRKKLVDSTDKADLRLIYLALAHMIKFRGHFLIEGDLNPDNSDVDKLFIQLVQTYNQLFEENPINASGVDAKAILSARLSKSRRLENLIAQLPGEKKNGLFGNLIALSLGLTPNFKSNFDLAEDAKLQLSKDTYDDDLDNLLAQIGDQYADLFLAAKNLSDAILLSDILRVNTEITKAPLSASMIKRYDEHHQDLTLLKALVRQQLPEKYKEIFFDQSKNGYAGYIDGGASQEEFYKFIKPILEKMDGTEELLVKLNREDLLRKQRTFDNGSIPHQIHLGELHAILRRQEDFYPFLKDNREKIEKILTFRIPYYVGPLARGNSRFAWMTRKSEETITPWNFEEVVDKGASAQSFIERMTNFDKNLPNEKVLPKHSLLYEYFTVYNELTKVKYVTEGMRKPAFLSGEQKKAIVDLLFKTNRKVTVKQLKEDYFKKIECFDSVEISGVEDRFNASLGTYHDLLKIIKDKDFLDNEENEDILEDIVLTLTLFEDREMIEERLKTYAHLFDDKVMKQLKRRRYTGWGRLSRKLINGIRDKQSGKTILDFLKSDGFANRNFMQLIHDDSLTFKEDIQKAQVSGQGDSLHEHIANLAGSPAIKKGILQTVKVVDELVKVMGRHKPENIVIEMARENQTTQKGQKNSRERMKRIEEGIKELGSQILKEHPVENTQLQNEKLYLYYLQNGRDMYVDQELDINRLSDYDVDHIVPQSFLKDDSIDNKVLTRSDKNRGKSDNVPSEEVVKKMKNYWRQLLNAKLITQRKFDNLTKAERGGLSELDKAGFIKRQLVETRQITKHVAQILDSRMNTKYDENDKLIREVKVITLKSKLVSDFRKDFQFYKVREINNYHHAHDAYLNAVVGTALIKKYPKLESEFVYGDYKVYDVRKMIAKSEQEIGKATAKYFFYSNIMNFFKTEITLANGEIRKRPLIETNGETGEIVWDKGRDFATVRKVLSMPQVNIVKKTEVQTGGFSKESILPKRNSDKLIARKKDWDPKKYGGFVSPTVAYSVLVVAKVEKGKSKKLKSVKELLGITIMERSSFEKNPIDFLEAKGYKEVKKDLIIKLPKYSLFELENGRKRMLASARELQKGNELALPSKYVNFLYLASHYEKLKGSPEDNEQKQLFVEQHKHYLDEIIEQISEFSKRVILADANLDKVLSAYNKHRDKPIREQAENIIHLFTLTNLGAPAAFKYFDTTIDRKQYRSTKEVLDATLIHQSITGLYETRIDLSQLGGDEGADKRTADGSEFESPKKKRKV

SEQ ID NO: 1446 - protein, 1588 aa, Artificial Sequence
  Description of Artificial Sequence: Synthetic polypeptide
MSEVEFSHEYWMRHALTLAKRARDEREVPVGAVLVLNNRVIGEGWNRAIGLHDPTAHAEIMALRQGGLVMQNYRLIDATLYVTFEPCVMCAGAMIHSRIGRVVFGVRNAKTGAAGSLMDVLHYPGMNHRVEITEGILADECAALLCTFFRMPRRVFNAQKKAQSSTDSGGSSGGSSGSETPGTSESATPESSGGSSGGSDKKYSIGLAIGTNSVGWAVITDEYKVPSKKFKVLGNTDRHSIKKNLIGALLFDSGETAEATRLKRTARRRYTRRKNRICYLQEIFSNEMAKVDDSFFHRLEESFLVEEDKKHERHPIFGNIVDEVAYHEKYPTIYHLRKKLVDSTDKADLRLIYLALAHMIKFRGHFLIEGDLNPDNSDVDKLFIQLVQTYNQLFEENPINASGVDAKAILSARLSKSRRLENLIAQLPGEKKNGLFGNLIALSLGLTPNFKSNFDLAEDAKLQLSKDTYDDDLDNLLAQIGDQYADLFLAAKNLSDAILLSDILRVNTEITKAPLSASMIKRYDEHHQDLTLLKALVRQQLPEKYKEIFFDQSKNGYAGYIDGGASQEEFYKFIKPILEKMDGTEELLVKLNREDLLRKQRTFDNGSIPHQIHLGELHAILRRQEDFYPFLKDNREKIEKILTFRIPYYVGPLARGNSRFAWMTRKSEETITPWNFEEVVDKGASAQSFIERMTNFDKNLPNEKVLPKHSLLYEYFTVYNELTKVKYVTEGMRKPAFLSGEQKKAIVDLLFKTNRKVTVKQLKEDYFKKIECFDSVEISGVEDRFNASLGTYHDLLKIIKDKDFLDNEENEDILEDIVLTLTLFEDREMIEERLKTYAHLFDDKVMKQLKRRRYTGWGRLSRKLINGIRDKQSGKTILDFLKSDGFANRNFMQLIHDDSLTFKEDIQKAQVSGQGDSLHEHIANLAGSPAIKKGILQTVKVVDELVKVMGRHKPENIVIEMARENQTTQKGQKNSRERMKRIEEGIKELGSQILKEHPVENTQLQNEKLYLYYLQNGRDMYVDQELDINRLSDYDVDHIVPQSFLKDDSIDNKVLTRSDKNRGKSDNVPSEEVVKKMKNYWRQLLNAKLITQRKFDNLTKAERGGLSELDKAGFIKRQLVETRQITKHVAQILDSRMNTKYDENDKLIREVKVITLKSKLVSDFRKDFQFYKVREINNYHHAHDAYLNAVVGTALIKKYPKLESEFVYGDYKVYDVRKMIAKSEQEIGKATAKYFFYSNIMNFFKTEITLANGEIRKRPLIETNGETGEIVWDKGRDFATVRKVLSMPQVNIVKKTEVQTGGFSKESILPKRNSDKLIARKKDWDPKKYGGFVSPTVAYSVLVVAKVEKGKSKKLKSVKELLGITIMERSSFEKNPIDFLEAKGYKEVKKDLIIKLPKYSLFELENGRKRMLASARELQKGNELALPSKYVNFLYLASHYEKLKGSPEDNEQKQLFVEQHKHYLDEIIEQISEFSKRVILADANLDKVLSAYNKHRDKPIREQAENIIHLFTLTNLGAPAAFKYFDTTIDRKQYRSTKEVLDATLIHQSITGLYETRIDLSQLGGDEGADKRTADGSEFESPKKKRKV

SEQ ID NO: 1447 - protein, 1588 aa, Artificial Sequence
  Description of Artificial Sequence: Synthetic polypeptide
MSEVEFSHEYWMRHALTLAKRARDEREVPVGAVLVLNNRVIGEGWNRAIGLHDPTAHAEIMALRQGGLVMQNYRLIDATLYVTFEPCVMCAGAMIHSRIGRVVFGVRNAKTGAAGSLMDVLHYPGMNHRVEITEGILADECAALLCTFFRMPRSVFNAQKKAQSSTDSGGSSGGSSGSETPGTSESATPESSGGSSGGSDKKYSIGLAIGTNSVGWAVITDEYKVPSKKFKVLGNTDRHSIKKNLIGALLFDSGETAEATRLKRTARRRYTRRKNRICYLQEIFSNEMAKVDDSFFHRLEESFLVEEDKKHERHPIFGNIVDEVAYHEKYPTIYHLRKKLVDSTDKADLRLIYLALAHMIKFRGHFLIEGDLNPDNSDVDKLFIQLVQTYNQLFEENPINASGVDAKAILSARLSKSRRLENLIAQLPGEKKNGLFGNLIALSLGLTPNFKSNFDLAEDAKLQLSKDTYDDDLDNLLAQIGDQYADLFLAAKNLSDAILLSDILRVNTEITKAPLSASMIKRYDEHHQDLTLLKALVRQQLPEKYKEIFFDQSKNGYAGYIDGGASQEEFYKFIKPILEKMDGTEELLVKLNREDLLRKQRTFDNGSIPHQIHLGELHAILRRQEDFYPFLKDNREKIEKILTFRIPYYVGPLARGNSRFAWMTRKSEETITPWNFEEVVDKGASAQSFIERMTNFDKNLPNEKVLPKHSLLYEYFTVYNELTKVKYVTEGMRKPAFLSGEQKKAIVDLLFKTNRKVTVKQLKEDYFKKIECFDSVEISGVEDRFNASLGTYHDLLKIIKDKDFLDNEENEDILEDIVLTLTLFEDREMIEERLKTYAHLFDDKVMKQLKRRRYTGWGRLSRKLINGIRDKQSGKTILDFLKSDGFANRNFMQLIHDDSLTFKEDIQKAQVSGQGDSLHEHIANLAGSPAIKKGILQTVKVVDELVKVMGRHKPENIVIEMARENQTTQKGQKNSRERMKRIEEGIKELGSQILKEHPVENTQLQNEKLYLYYLQNGRDMYVDQELDINRLSDYDVDHIVPQSFLKDDSIDNKVLTRSDKNRGKSDNVPSEEVVKKMKNYWRQLLNAKLITQRKFDNLTKAERGGLSELDKAGFIKRQLVETRQITKHVAQILDSRMNTKYDENDKLIREVKVITLKSKLVSDFRKDFQFYKVREINNYHHAHDAYLNAVVGTALIKKYPKLESEFVYGDYKVYDVRKMIAKSEQEIGKATAKYFFYSNIMNFFKTEITLANGEIRKRPLIETNGETGEIVWDKGRDFATVRKVLSMPQVNIVKKTEVQTGGFSKESILPKRNSDKLIARKKDWDPKKYGGFVSPTVAYSVLVVAKVEKGKSKKLKSVKELLGITIMERSSFEKNPIDFLEAKGYKEVKKDLIIKLPKYSLFELENGRKRMLASARELQKGNELALPSKYVNFLYLASHYEKLKGSPEDNEQKQLFVEQHKHYLDEIIEQISEFSKRVILADANLDKVLSAYNKHRDKPIREQAENIIHLFTLTNLGAPAAFKYFDTTIDRKQYRSTKEVLDATLIHQSITGLYETRIDLSQLGGDEGADKRTADGSEFESPKKKRKV

SEQ ID NO: 1448 - protein, 1588 aa, Artificial Sequence
  Description of Artificial Sequence: Synthetic polypeptide
MSEVEFSHEYWMRHALTLAKRARDEREVPVGAVLVLNNRVIGEGWNRAIGLHDPTAHAEIMALRQGGLVMQNYRLYDATLYVTFEPCVMCAGAMIHSRIGRVVFGVRNAKTGAAGSLMDVLHHPGMNHRVEITEGILADECAALLCRFFRMPRRVFNAQKKAQSSTDSGGSSGGSSGSETPGTSESATPESSGGSSGGSDKKYSIGLAIGTNSVGWAVITDEYKVPSKKFKVLGNTDRHSIKKNLIGALLFDSGETAEATRLKRTARRRYTRRKNRICYLQEIFSNEMAKVDDSFFHRLEESFLVEEDKKHERHPIFGNIVDEVAYHEKYPTIYHLRKKLVDSTDKADLRLIYLALAHMIKFRGHFLIEGDLNPDNSDVDKLFIQLVQTYNQLFEENPINASGVDAKAILSARLSKSRRLENLIAQLPGEKKNGLFGNLIALSLGLTPNFKSNFDLAEDAKLQLSKDTYDDDLDNLLAQIGDQYADLFLAAKNLSDAILLSDILRVNTEITKAPLSASMIKRYDEHHQDLTLLKALVRQQLPEKYKEIFFDQSKNGYAGYIDGGASQEEFYKFIKPILEKMDGTEELLVKLNREDLLRKQRTFDNGSIPHQIHLGELHAILRRQEDFYPFLKDNREKIEKILTFRIPYYVGPLARGNSRFAWMTRKSEETITPWNFEEVVDKGASAQSFIERMTNFDKNLPNEKVLPKHSLLYEYFTVYNELTKVKYVTEGMRKPAFLSGEQKKAIVDLLFKTNRKVTVKQLKEDYFKKIECFDSVEISGVEDRFNASLGTYHDLLKIIKDKDFLDNEENEDILEDIVLTLTLFEDREMIEERLKTYAHLFDDKVMKQLKRRRYTGWGRLSRKLINGIRDKQSGKTILDFLKSDGFANRNFMQLIHDDSLTFKEDIQKAQVSGQGDSLHEHIANLAGSPAIKKGILQTVKVVDELVKVMGRHKPENIVIEMARENQTTQKGQKNSRERMKRIEEGIKELGSQILKEHPVENTQLQNEKLYLYYLQNGRDMYVDQELDINRLSDYDVDHIVPQSFLKDDSIDNKVLTRSDKNRGKSDNVPSEEVVKKMKNYWRQLLNAKLITQRKFDNLTKAERGGLSELDKAGFIKRQLVETRQITKHVAQILDSRMNTKYDENDKLIREVKVITLKSKLVSDFRKDFQFYKVREINNYHHAHDAYLNAVVGTALIKKYPKLESEFVYGDYKVYDVRKMIAKSEQEIGKATAKYFFYSNIMNFFKTEITLANGEIRKRPLIETNGETGEIVWDKGRDFATVRKVLSMPQVNIVKKTEVQTGGFSKESILPKRNSDKLIARKKDWDPKKYGGFVSPTVAYSVLVVAKVEKGKSKKLKSVKELLGITIMERSSFEKNPIDFLEAKGYKEVKKDLIIKLPKYSLFELENGRKRMLASARELQKGNELALPSKYVNFLYLASHYEKLKGSPEDNEQKQLFVEQHKHYLDEIIEQISEFSKRVILADANLDKVLSAYNKHRDKPIREQAENIIHLFTLTNLGAPAAFKYFDTTIDRKQYRSTKEVLDATLIHQSITGLYETRIDLSQLGGDEGADKRTADGSEFESPKKKRKV

SEQ ID NO: 1449 - protein, 1588 aa, Artificial Sequence
  Description of Artificial Sequence: Synthetic polypeptide
MSEVEFSHEYWMRHALTLAKRARDEREVPVGAVLVLNNRVIGEGWNRAIGLHDPTAHAEIMALRQGGLVMQNYRLIDATLYSTFEPCVMCAGAMIHSRIGRVVFGVRNAKTGAAGSLMDVLHYPGMNHRVEITEGILADECAALLCYFFRMPRRVFNAQKKAQSSTDSGGSSGGSSGSETPGTSESATPESSGGSSGGSDKKYSIGLAIGTNSVGWAVITDEYKVPSKKFKVLGNTDRHSIKKNLIGALLFDSGETAEATRLKRTARRRYTRRKNRICYLQEIFSNEMAKVDDSFFHRLEESFLVEEDKKHERHPIFGNIVDEVAYHEKYPTIYHLRKKLVDSTDKADLRLIYLALAHMIKFRGHFLIEGDLNPDNSDVDKLFIQLVQTYNQLFEENPINASGVDAKAILSARLSKSRRLENLIAQLPGEKKNGLFGNLIALSLGLTPNFKSNFDLAEDAKLQLSKDTYDDDLDNLLAQIGDQYADLFLAAKNLSDAILLSDILRVNTEITKAPLSASMIKRYDEHHQDLTLLKALVRQQLPEKYKEIFFDQSKNGYAGYIDGGASQEEFYKFIKPILEKMDGTEELLVKLNREDLLRKQRTFDNGSIPHQIHLGELHAILRRQEDFYPFLKDNREKIEKILTFRIPYYVGPLARGNSRFAWMTRKSEETITPWNFEEVVDKGASAQSFIERMTNFDKNLPNEKVLPKHSLLYEYFTVYNELTKVKYVTEGMRKPAFLSGEQKKAIVDLLFKTNRKVTVKQLKEDYFKKIECFDSVEISGVEDRFNASLGTYHDLLKIIKDKDFLDNEENEDILEDIVLTLTLFEDREMIEERLKTYAHLFDDKVMKQLKRRRYTGWGRLSRKLINGIRDKQSGKTILDFLKSDGFANRNFMQLIHDDSLTFKEDIQKAQVSGQGDSLHEHIANLAGSPAIKKGILQTVKVVDELVKVMGRHKPENIVIEMARENQTTQKGQKNSRERMKRIEEGIKELGSQILKEHPVENTQLQNEKLYLYYLQNGRDMYVDQELDINRLSDYDVDHIVPQSFLKDDSIDNKVLTRSDKNRGKSDNVPSEEVVKKMKNYWRQLLNAKLITQRKFDNLTKAERGGLSELDKAGFIKRQLVETRQITKHVAQILDSRMNTKYDENDKLIREVKVITLKSKLVSDFRKDFQFYKVREINNYHHAHDAYLNAVVGTALIKKYPKLESEFVYGDYKVYDVRKMIAKSEQEIGKATAKYFFYSNIMNFFKTEITLANGEIRKRPLIETNGETGEIVWDKGRDFATVRKVLSMPQVNIVKKTEVQTGGFSKESILPKRNSDKLIARKKDWDPKKYGGFVSPTVAYSVLVVAKVEKGKSKKLKSVKELLGITIMERSSFEKNPIDFLEAKGYKEVKKDLIIKLPKYSLFELENGRKRMLASARELQKGNELALPSKYVNFLYLASHYEKLKGSPEDNEQKQLFVEQHKHYLDEIIEQISEFSKRVILADANLDKVLSAYNKHRDKPIREQAENIIHLFTLTNLGAPAAFKYFDTTIDRKQYRSTKEVLDATLIHQSITGLYETRIDLSQLGGDEGADKRTADGSEFESPKKKRKV

SEQ ID NO: 1450-2999 - skipped (1550 entries)

SEQ ID NO: 3000 - RNA, 80 nt, Artificial Sequence; identical to SEQ ID NO: 224
  Description of Artificial Sequence: Synthetic oligonucleotide

SEQ ID NO: 3001-4000 - skipped (1000 entries)

SEQ ID NO: 4001 - DNA, 1350 bp, Rabies lyssavirus
atggatgccgacaagattgtattcaaagtcaataatcaggtggtctctttgaagcctgagattatcgtggatcaatatgagtacaagtaccctgccatcaaagatttgaaaaagccctgtataaccctaggaaaggctcccgatttaaataaagcatacaagtcagttttgtcaggcatgagcgccgccaaacttaatcctgacgatgtatgttcctatttggcagcggcaatgcagttttttgaggggacatgtccggaagactggaccagctatggaattgtgattgcacgaaaaggagataagatcaccccaggttctctggtggagataaaacgtactgatgtagaagggaattgggctctgacaggaggcatggaactgacaagagaccccactgtccctgagcatgcgtccttagtcggtcttctcttgagtctgtataggttgagcaaaatatccgggcaaaacactggtaactataagacaaacattgcagacaggatagagcagatttttgagacagccccttttgttaaaatcgtggaacaccatactctaatgacaactcacaaaatgtgtgctaattggagtactataccaaacttcagatttttggccggaacctatgacatgtttttctcccggattgagcatctatattcagcaatcagagtgggcacagttgtcactgcttatgaagactgttcaggactggtatcatttactgggttcataaaacaaatcaatctcaccgctagagaggcaatactatatttcttccacaagaactttgaggaagagataagaagaatgtttgagccagggcaggagacagctgttcctcactcttatttcatccacttccgttcactaggcttgagtgggaaatctccttattcatcaaatgctgttggtcacgtgttcaatctcattcactttgtaggatgctatatgggtcaagtcagatccctaaatgcaacggttattgctgcatgtgctcctcatgaaatgtctgttctagggggctatctgggagaggaattcttcgggaaagggacatttgaaagaagattcttcagagatgagaaagaacttcaagaatacgaggcggctgaactgacaaagactgacgtagcactggcagatgatggaactgtcaactctgacgacgaggactacttttcaggtgaaaccagaagtccggaggctgtttatactcgaatcatgatgaatggaggtcgactaaagagatctcacatacggagatatgtctcagtcagttccaatcatcaagcccgtccaaactcattcgccgagtttctaaacaagacatattcgagtgactca

SEQ ID NO: 4002 - protein, 450 aa, Rabies lyssavirus
MDADKIVFKVNNQVVSLKPEIIVDQYEYKYPAIKDLKKPCITLGKAPDLNKAYKSVLSGMSAAKLNPDDVCSYLAAAMQFFEGTCPEDWTSYGIVIARKGDKITPGSLVEIKRTDVEGNWALTGGMELTRDPTVPEHASLVGLLLSLYRLSKISGQNTGNYKTNIADRIEQIFETAPFVKIVEHHTLMTTHKMCANWSTIPNFRFLAGTYDMFFSRIEHLYSAIRVGTVVTAYEDCSGLVSFTGFIKQINLTAREAILYFFHKNFEEEIRRMFEPGQETAVPHSYFIHFRSLGLSGKSPYSSNAVGHVFNLIHFVGCYMGQVRSLNATVIAACAPHEMSVLGGYLGEEFFGKGTFERRFFRDEKELQEYEAAELTKTDVALADDGTVNSDDEDYFSGETRSPEAVYTRIMMNGGRLKRSHIRRYVSVSSNHQARPNSFAEFLNKTYSSDS

SEQ ID NO: 4003 - DNA, 6378 bp, Rabies lyssavirus
ctcgatcctggagaggtctatgatgaccctattgacccaatcgagttagaggctgaacccagaggaacccccattgtccccaacatcttgaggaactctgactacaatctcaactctcctttgatagaagatcctgctagactaatgttagaatggttaaaaacagggaatagaccttatcggatgactctaacagacaattgctccaggtctttcagagttttgaaagattatttcaagaaggtagatttgggttctctcaaggtgggcggaatggctgcacagtcaatgatttctctctggttatatggtgcccactctgaatccaacaggagccggagatgtataacagacttggcccatttctattccaagtcgtcccccatagagaagctgttgaatctcacgctaggaaatagagggctgagaatccccccagagggagtgttaagttgccttgagagggttgattatgataatgcatttggaaggtatcttgccaacacgtattcctcttacttgttcttccatgtaatcaccttatacatgaacgccctagactgggatgaagaaaagaccatcctagcattatggaaagatttaacctcagtggacatcgggaaggacttggtaaagttcaaagaccaaatatggggactgctgatcgtgacaaaggactttgtttactcccaaagttccaattgtctttttgacagaaactacacacttatgctaaaagatcttttcttgtctcgcttcaactccttaatggtcttgctctctcccccagagccccgatactcagatgacttgatatctcaactatgccagctgtacattgctggggatcaagtcttgtctatgtgtggaaactccggctatgaagtcatcaaaatattggagccatatgtcgtgaatagtttagtccagagagcagaaaagtttaggcctctcattcattccttgggagactttcctgtatttataaaagacaaggtaagtcaacttgaagagacgttcggtccctgtgcaagaaggttctttagggctctggatcaattcgacaacatacatgacttggtttttgtgtttggctgttacaggcattgggggcacccatatatagattatcgaaagggtctgtcaaaactatatgatcaggttcaccttaaaaaaatgatagataagtcctaccaggagtgcttagcaagcgacctagccaggaggatccttagatggggttttgataagtactccaagtggtatctggattcaagattcctagcccgagaccaccccttgactccttatatcaaaacccaaacatggccacccaaacatattgtagacttggtgggggatacatggcacaagctcccgatcacgcagatctttgagattcctgaatcaatggatccgtcagaaatattggatgacaaatcacattctttcaccagaacgagactagcttcttggctgtcagaaaaccgaggggggcctgttcctagcgaaaaagttattatcacggccctgtctaagccgcctgtcaatccccgagagtttctgaggtctatagacctcggaggattgccagatgaagacttgataattggcctcaagccaaaggaacgggaattgaagattgaaggtcgattctttgctctaatgtcatggaatctaagattgtattttgtcatcactgaaaaactcttggccaactacatcttgccactttttgacgcgctgactatgacagacaacctgaacaaggtgtttaaaaagctgatcgacagggtcaccgggcaagggcttttggactattcaagggtcacatatgcatttcacctggactatgaaaagtggaacaaccatcaaagattagagtcaacagaggatgtattttctgtcctagatcaagtgtttggattgaagagagtgttttctagaacacacgagttttttcaaaaggcctggatctattattcagacagatcagacctcatcgggttacgggaggatcaaatatactgcttagatgcgtccaacggcccaacctgttggaatggccaggatggcgggctagaaggcttacggcagaagggctggagtctagtcagcttattgatgatagatagagaatctcaaatcaggaacacaagaaccaaaatactagctcaaggagacaaccaggttttatgtccgacatacatgttgtcgccagggctatctcaagaggggctcctctatgaattggagagaatatcaaggaatgcactttcgatatacagagccgtcgaggaaggggcatctaagctagggctgatcatcaagaaagaagagaccatgtgtagttatgacttcctcatctatggaaaaacccctttgtttagaggtaacatattggtgcctgagtccaaaagatgggccagagtctcttgcgtctctaatgaccaaatagtcaacctcgccaatataatgtcgacagtgtccaccaatgcgctaacagtggcacaacactctcaatctttgatcaaaccgatgagggattttctgctcatgtcagtacaggcagtctttcactacctgctatttagcccaatcttaaagggaagagtttacaagattctgagcgctgaaggggagagctttctcctagccatgtcaaggataatctatctagatccttctttgggagggatatctggaatgtccctcggaagattccatatacgacagttctcagaccctgtctctgaagggttatccttctggagagagatctggttaagctcccaagagtcctggattcacgcgttgtgtcaagaggctggaaacccagatcttggagagagaacactcgagagcttcactcgccttctagaagatccgaccaccttaaatatcagaggaggggccagtcctaccattctactcaaggatgcaatcagaaaggctttatatgacgaggtggacaaggtggaaaattcagagtttcgagaggcaatcctgttgtccaagacccatagagataattttatactcttcttaatatctgttgagcctctgtttcctcgatttctcagtgagctattcagttcgtcttttttgggaatccccgagtcaatcattggattgatacaaaactcccgaacgataagaaggcagtttagaaagagtctctcaaaaactttagaagaatccttctacaactcagagatccacgggattagtcggatgacccagacacctcagagggttgggggggtgtggccttgctcttcagagagggcagatctacttagggagatctcttggggaagaaaagtggtaggcacgacagttcctcacccttctgagatgttgggattacttcccaagtcctctatttcttgcacttgtggagcaacaggaggaggcaatcctagagtttctgtatcagtactcccgtcctttgatcagtcatttttttcacgaggccccctaaagggatacttgggctcgtccacctctatgtcgacccagctattccatgcatgggaaaaagtcactaatgttcatgtggtgaagagagctctatcgttaaaagaatctataaactggttcattactagagattccaacttggctcaagctctaattaggaacattatgtctctgacaggccctgatttccctctagaggaggcccctgtcttcaaaaggacggggtcagccttgcataggttcaagtctgccagatacagcgaaggagggtattcttctgtctgcccgaacctcctctctcatatttctgttagtacagacaccatgtctgatttgacccaagacgggaagaactacgatttcatgttccagccattgatgctttatgcacagacatggacatcagagctggtacagagagacacaaggctaagagactctacgtttcattggcacctccgatgcaacaggtgtgtgagacccattgacgacgtgaccctggagacctctcagatcttcgagtttccggatgtgtcgaaaagaatatccagaatggtttctggggctgtgcctcacttccagaggcttcccgatatccgtctgagaccaggagattttgaatctctaagcggtagagaaaagtctcaccatatcggatcagctcaggggctcttatactcaatcttagtggcaattcacgactcaggatacaatgatggaaccatcttccctgtcaacatatacggcaaggtttcccctagagactatttgagagggctcgcaaggggagtattgataggatcctcgatttgcttcttgacaagaatgacaaatatcaatattaatagacctcttgaattggtctcaggggtaatctcatatattctcctgaggctagataaccatccctccttgtacataatgctcagagaaccgtctcttagaggagagatattttctatccctcagaaaatccccgccgcttatccaaccactatgaaagaaggcaacagatcaatcttgtgttatctccaacatgtgctacgctatgagcgagagataatcacggcgtctccagagaatgactggctatggatcttttcagactttagaagtgccaaaatgacgtacctatccctcattacttaccagtctcatcttctactccagagggttgagagaaacctatctaagagtatgagagataacctgcgacaattgagttctttgatgaggcaggtgctgggcgggcacggagaagataccttagagtcagacgacaacattcaacgactgctaaaagactctttacgaaggacaagatgggtggatcaagaggtgcgccatgcagctagaaccatgactggagattacagccccaacaagaaggtgtcccgtaaggtaggatgttcagaatgggtctgctctgctcaacaggttgcagtctctacctcagcaaacccggcccctgtctcggagcttgacataagggccctctctaagaggttccagaaccctttgatctcgggcttgagagtggttcagtgggcaaccggtgctcattataagcttaagcctattctagatgatctcaatgttttcccatctctctgccttgtagttggggacgggtcaggggggatatcaagggcagtcctcaacatgtttccagatgccaagcttgtgttcaacagtcttttagaggtgaatgacctgatggcttccggaacacatccactgcctccttcagcaatcatgaggggaggaaatgatatcgtctccagagtgatagatcttgactcaatctgggaaaaaccgtccgacttgagaaacttggcaacctggaaatacttccagtcagtccaaaagcaggtcaacatgtcctatgacctcattatttgcgatgcagaagttactgacattgcatctatcaaccggatcaccctgttaatgtccgattttgcattgtctatagatggaccactctatttggtcttcaaaacttatgggactatgctagtaaatccaaactacaaggctattcaacacctgtcaagagcgttcccctcggtcacagggtttatcacccaagtaacttcgtctttttcatctgagctctacctccgattctccaaacgagggaagtttttcagagatgctgagtacttgacctcttccacccttcgagaaatgagccttgtgttattcaattgtagcagccccaagagtgagatgcagagagctcgttccttgaactatcaggatcttgtgagaggatttcctgaagaaatcatatcaaatccttacaatgagatgatcataactctgattgacagtgatgtagaatcttttctagtccacaagatggttgatgatcttgagttacagaggggaactctgtctaaagtggctatcattatagccatcatgatagttttctccaacagagtcttcaacgtttccaaacccctaactgacccctcgttctatccaccgtctgatcccaaaatcctgaggcacttcaacatatgttgcagtactatgatgtatctatctactgctttaggtgacgtccctagcttcgcaagacttcacgacctgtataacagacctataacttattacttcagaaagcaagtcattcgagggaacgtttatctatcttggagttggtccaacgacacctcagtgttcaaaagggtagcctgtaattctagcctgagtctgtcatctcactggatcaggttgatttacaagatagtgaagactaccagactcgttggcagcatcaaggatctatccagagaagtggaaagacaccttcataggtacaacaggtggatcaccctagaggatatcagatctagatcatccctactagactacagttgcctg

SEQ ID NO: 4004 - protein, 2126 aa, Rabies lyssavirus
LDPGEVYDDPIDPIELEAEPRGTPIVPNILRNSDYNLNSPLIEDPARLMLEWLKTGNRPYRMTLTDNCSRSFRVLKDYFKKVDLGSLKVGGMAAQSMISLWLYGAHSESNRSRRCITDLAHFYSKSSPIEKLLNLTLGNRGLRIPPEGVLSCLERVDYDNAFGRYLANTYSSYLFFHVITLYMNALDWDEEKTILALWKDLTSVDIGKDLVKFKDQIWGLLIVTKDFVYSQSSNCLFDRNYTLMLKDLFLSRFNSLMVLLSPPEPRYSDDLISQLCQLYIAGDQVLSMCGNSGYEVIKILEPYVVNSLVQRAEKFRPLIHSLGDFPVFIKDKVSQLEETFGPCARRFFRALDQFDNIHDLVFVFGCYRHWGHPYIDYRKGLSKLYDQVHLKKMIDKSYQECLASDLARRILRWGFDKYSKWYLDSRFLARDHPLTPYIKTQTWPPKHIVDLVGDTWHKLPITQIFEIPESMDPSEILDDKSHSFTRTRLASWLSENRGGPVPSEKVIITALSKPPVNPREFLRSIDLGGLPDEDLIIGLKPKERELKIEGRFFALMSWNLRLYFVITEKLLANYILPLFDALTMTDNLNKVFKKLIDRVTGQGLLDYSRVTYAFHLDYEKWNNHQRLESTEDVFSVLDQVFGLKRVFSRTHEFFQKAWIYYSDRSDLIGLREDQIYCLDASNGPTCWNGQDGGLEGLRQKGWSLVSLLMIDRESQIRNTRTKILAQGDNQVLCPTYMLSPGLSQEGLLYELERISRNALSIYRAVEEGASKLGLIIKKEETMCSYDFLIYGKTPLFRGNILVPESKRWARVSCVSNDQIVNLANIMSTVSTNALTVAQHSQSLIKPMRDFLLMSVQAVFHYLLFSPILKGRVYKILSAEGESFLLAMSRIIYLDPSLGGISGMSLGRFHIRQFSDPVSEGLSFWREIWLSSQESWIHALCQEAGNPDLGERTLESFTRLLEDPTTLNIRGGASPTILLKDAIRKALYDEVDKVENSEFREAILLSKTHRDNFILFLISVEPLFPRFLSELFSSSFLGIPESIIGLIQNSRTIRRQFRKSLSKTLEESFYNSEIHGISRMTQTPQRVGGVWPCSSERADLLREISWGRKVVGTTVPHPSEMLGLLPKSSISCTCGATGGGNPRVSVSVLPSFDQSFFSRGPLKGYLGSSTSMSTQLFHAWEKVTNVHVVKRALSLKESINWFITRDSNLAQALIRNIMSLTGPDFPLEEAPVFKRTGSALHRFKSARYSEGGYSSVCPNLLSHISVSTDTMSDLTQDGKNYDFMFQPLMLYAQTWTSELVQRDTRLRDSTFHWHLRCNRCVRPIDDVTLETSQIFEFPDVSKRISRMVSGAVPHFQRLPDIRLRPGDFESLSGREKSHHIGSAQGLLYSILVAIHDSGYNDGTIFPVNIYGKVSPRDYLRGLARGVLIGSSICFLTRMTNININRPLELVSGVISYILLRLDNHPSLYIMLREPSLRGEIFSIPQKIPAAYPTTMKEGNRSILCYLQHVLRYEREIITASPENDWLWIFSDFRSAKMTYLSLITYQSHLLLQRVERNLSKSMRDNLRQLSSLMRQVLGGHGEDTLESDDNIQRLLKDSLRRTRWVDQEVRHAARTMTGDYSPNKKVSRKVGCSEWVCSAQQVAVSTSANPAPVSELDIRALSKRFQNPLISGLRVVQWATGAHYKLKPILDDLNVFPSLCLVVGDGSGGISRAVLNMFPDAKLVFNSLLEVNDLMASGTHPLPPSAIMRGGNDIVSRVIDLDSIWEKPSDLRNLATWKYFQSVQKQVNMSYDLIICDAEVTDIASINRITLLMSDFALSIDGPLYLVFKTYGTMLVNPNYKAIQHLSRAFPSVTGFITQVTSSFSSELYLRFSKRGKFFRDAEYLTSSTLREMSLVLFNCSSPKSEMQRARSLNYQDLVRGFPEEIISNPYNEMIITLIDSDVESFLVHKMVDDLELQRGTLSKVAIIIAIMIVFSNRVFNVSKPLTDPSFYPPSDPKILRHFNICCSTMMYLSTALGDVPSFARLHDLYNRPITYYFRKQVIRGNVYLSWSWSNDTSVFKRVACNSSLSLSSHWIRLIYKIVKTTRLVGSIKDLSREVERHLHRYNRWITLEDIRSRSSLLDYSCL

SEQ ID NO: 4005 - DNA, 603 bp, Rabies lyssavirus
ttctagaagcagagaggaatctttgtcctcttcggacctttgtgtctgaagagacatgtcagaccatagttgacatgctctcgggttcatgttgatacaccagactctgccctggatatgacactgttttgcaatcactcttatttgcaatccgacgaactcagtatcatcatcccaagtgatctcctgagagtattccaactcctccccttcaagagggcccctggaatcagcccactggaagataaaggttctcctcaatttgtatacccagttcaggccctcagggactggagatcctgacaaagccagtccaataaccactttgactaacccgatcatcctatgattcccagaatatatctcgtcgaatgatttcagaatgtgccgcaggatcctgaacgagtaaccattcgggctacacactttaacccttccgttgatacaaaagttcctcatgttcttcttgcctgtaagttctttcagcgggacgtattcagggggtggaagccacaagtcatcgtcatccagaggggctgacgcgggagaggatttttgagtgtcctcgtccctgcggtttttcactatcttacgtaggaggtt

SEQ ID NO: 4006 - protein, 201 aa, Rabies lyssavirus
NLLRKIVKNRRDEDTQKSSPASAPLDDDDLWLPPPEYVPLKELTGKKNMRNFCINGRVKVCSPNGYSFRILRHILKSFDEIYSGNHRMIGLVKVVIGLALSGSPVPEGLNWVYKLRRTFIFQWADSRGPLEGEELEYSQEITWDDDTEFVGLQIRVIAKQCHIQGRVWCINMNPRACQLWSDMSLQTQRSEEDKDSSLLLE

SEQ ID NO: 4007 - DNA, 888 bp, Rabies lyssavirus
agcaagatctttgtcaatcctagtgctattagagccggtctggccgatcttgagatggctgaagaaactgttgatctgatcaatagaaatatcgaagacaatcaggctcatctccaaggggaacccatagaggtggacaatctccctgaggatatggggcgacttcacctggatgatggaaaatcgcccaaccatggtgagatagccaaggtgggagaaggcaagtatcgagaggactttcagatggatgaaggagaggatcctagcttcctgttccagtcatacctggaaaatgttggagtccaaatagtcagacaaatgaggtcaggagagagatttctcaagatatggtcacagaccgtagaagagattatatcctatgtcgcggtcaactttcccaaccctccaggaaagtcttcagaggataaatcaacccagactactggccgagagctcaagaaggagacaacacccactccttctcagagagaaagccaatcatcgaaagccaggatggcggctcaaattgcttctggccctccagcccttgaatggtcggctaccaatgaagaggatgatctatcagtggaggctgagatcgctcaccagattgcagaaagtttctccaaaaaatataagtttccctctcgatcctcagggatactcttgtataattttgagcaattgaaaatgaaccttgatgatatagttaaagaggcaaaaaatgtaccaggtgtgacccgtttagcccatgacgggtccaaactccccctaagatgtgtactgggatgggtcgctttggccaactctaagaaattccagttgttagtcgaatccgacaagctgagtaaaatcatgcaagatgacttgaatcgctatacatcttgc

SEQ ID NO: 4008 - protein, 296 aa, Rabies lyssavirus
SKIFVNPSAIRAGLADLEMAEETVDLINRNIEDNQAHLQGEPIEVDNLPEDMGRLHLDDGKSPNHGEIAKVGEGKYREDFQMDEGEDPSFLFQSYLENVGVQIVRQMRSGERFLKIWSQTVEEIISYVAVNFPNPPGKSSEDKSTQTTGRELKKETTPTPSQRESQSSKARMAAQIASGPPALEWSATNEEDDLSVEAEIAHQIAESFSKKYKFPSRSSGILLYNFEQLKMNLDDIVKEAKNVPGVTRLAHDGSKLPLRCVLGWVALANSKKFQLLVESDKLSKIMQDDLNRYTSC

SEQ ID NO: 4009 - DNA, 1572 bp, Rabies lyssavirus
atggttcctcaggctctcctgtttgtaccccttctggtttttccattgtgttttgggaaattccctatttacacgataccagacaagcttggtccctggagtccgattgacatacatcacctcagctgcccaaacaatttggtagtggaggacgaaggatgcaccaacctgtcagggttctcctacatggaacttaaagttggatacatcttagccataaaagtgaacgggttcacttgcacaggcgttgtgacggaggctgaaacctacactaacttcgttggttatgtcacaaccacgttcaaaagaaagcatttccgcccaacaccagatgcatgtagagccgcgtacaactggaagatggccggtgaccccagatatgaagagtctctacacaatccgtaccctgactaccgctggcttcgaactgtaaaaaccaccaaggagtctctcgttatcatatctccaagtgtggcagatttggacccatatgacagatcccttcactcgagggtcttccctagcgggaagtgctcaggagtagcggtgtcttctacctactgctccactaaccacgattacaccatttggatgcccgagaatccgagactagggatgtcttgtgacatttttaccaatagtagagggaagagagcatccaaagggagtgagacttgcggctttgtagatgaaagaggcctatataagtctttaaaaggagcatgcaaactcaagttatgtggagttctaggacttagacttatggatggaacatgggtctcgatgcaaacatcaaatgaaaccaaatggtgccctcccgataagttggtgaacctgcacgactttcgctcagacgaaattgagcaccttgttgtagaggagttggtcaggaagagagaggagtgtctggatgcactagagtccatcatgacaaccaagtcagtgagtttcagacgtctcagtcatttaagaaaacttgtccctgggtttggaaaagcatataccatattcaacaagaccttgatggaagccgatgctcactacaagtcagtcagaacttggaatgagatcctcccttcaaaagggtgtttaagagttggggggaggtgtcatcctcatgtgaacggggtgtttttcaatggtataatattaggacctgacggcaatgtcttaatcccagagatgcaatcatccctcctccagcaacatatggagttgttggaatcctcggttatcccccttgtgcaccccctggcagacccgtctaccgttttcaaggacggtgacgaggctgaggattttgttgaagttcaccttcccgatgtgcacaatcaggtctcaggagttgacttgggtctcccgaactgggggaagtatgtattactgagtgcaggggccctgactgccttgatgttgataattttcctgatgacatgttgtagaagagtcaatcgatcagaacctacgcaacacaatctcagagggacagggagggaggtgtcagtcactccccaaagcgggaagatcatatcttcatgggaatcacacaagagtgggggtgagaccagactg

SEQ ID NO: 4010 - protein, 524 aa, Rabies lyssavirus
MVPQALLFVPLLVFPLCFGKFPIYTIPDKLGPWSPIDIHHLSCPNNLVVEDEGCTNLSGFSYMELKVGYILAIKVNGFTCTGVVTEAETYTNFVGYVTTTFKRKHFRPTPDACRAAYNWKMAGDPRYEESLHNPYPDYRWLRTVKTTKESLVIISPSVADLDPYDRSLHSRVFPSGKCSGVAVSSTYCSTNHDYTIWMPENPRLGMSCDIFTNSRGKRASKGSETCGFVDERGLYKSLKGACKLKLCGVLGLRLMDGTWVSMQTSNETKWCPPDKLVNLHDFRSDEIEHLVVEELVRKREECLDALESIMTTKSVSFRRLSHLRKLVPGFGKAYTIFNKTLMEADAHYKSVRTWNEILPSKGCLRVGGRCHPHVNGVFFNGIILGPDGNVLIPEMQSSLLQQHMELLESSVIPLVHPLADPSTVFKDGDEAEDFVEVHLPDVHNQVSGVDLGLPNWGKYVLLSAGALTALMLIIFLMTCCRRVNRSEPTQHNLRGTGREVSVTPQSGKIISSWESHKSGGETRL

SEQ ID NO: 4011 - DNA, 20 bp, Artificial Sequence
  Description of Artificial Sequence: Synthetic oligonucleotide
gaacacaaagcatagactgc

SEQ ID NO: 4012 - DNA, 20 bp, Artificial Sequence
  Description of Artificial Sequence: Synthetic oligonucleotide
tgtcggagttcgccctggag

SEQ ID NO: 4013 - DNA, 1353 bp, Artificial Sequence
  Description of Artificial Sequence: Synthetic polynucleotide
atggatgccgacaagattgtattcaaagtcaacaaccaggtggtgtccctgaagcctgagatcatcgtggaccagtacgagtacaagtaccccgccatcaaggacctgaagaagccctgtatcaccctgggcaaagcccctgacctgaacaaagcctacaagagcgtgctgagcggcatgtctgccgccaagctgaaccctgatgacgtgtgctcttatctggccgctgccatgcagttcttcgagggcacatgtcccgaggactggaccagctatggaatcgtgatcgcccggaagggcgataagatcacacctggcagcctggtggaaatcaagagaaccgacgtggaaggcaactgggccctgacaggtggcatggaactgaccagagatcccaccgtgcctgagcacgcttctcttgttggactgctgctgagcctgtaccggctgtctaagatcagcggacagaacaccggcaactacaagaccaatatcgccgaccggatcgagcagattttcgagacagcccctttcgtgaagatcgtggaacaccacacactgatgaccacacacaagatgtgcgccaactggtctacaatccccaacttcagattcctggccggcacctacgacatgttcttcagcagaatcgagcacctgtactctgccatcagagtgggcacagtcgtgaccgcctacgaggattgctctggcctggtgtccttcaccggcttcatcaagcagatcaacctgaccgccagagaggccatcctgtactttttccacaagaacttcgaggaagagatccggcggatgttcgagcccggacaagaaacagccgtgcctcacagctacttcatccacttcagaagcctgggcctgtccggcaagagcccctactcttctaatgccgtgggccacgtgttcaacctgatccacttcgtgggctgctacatgggccaagtgcggagcctgaatgccacagtgattgccgcctgtgctccccacgaaatgtctgtgctcggaggctatctgggcgaagagttctttggcaagggcaccttcgagcggagattcttccgggacgagaaagagctgcaagagtacgaggccgccgagctgaccaaaacagatgtggccctggccgatgacggcaccgtgaactctgacgacgaggactacttcagcggcgagactagaagccccgaggccgtgtatacccggattatgatgaatggcggcaggctgaagcggagccacattcggagatacgtgtccgtgtccagcaaccatcaggccagacctaacagcttcgccgagttcctgaacaagacctactcgagtgactcataa

SEQ ID NO: 4014 - DNA, 6384 bp, Artificial Sequence
  Description of Artificial Sequence: Synthetic polynucleotide
atgctcgatcctggagaggtctatgatgaccccatcgatcctatcgagctggaagccgagcctagaggcacacccatcgtgcccaacatcctgcggaacagcgactacaacctgaacagccctctgatcgaggaccccgccagactgatgctggaatggctgaaaaccggcaacagaccctaccggatgaccctgaccgataactgctcccggtccttcagggtgctgaaggactacttcaagaaggtggacctgggcagcctgaaagtcggaggaatggccgctcagagcatgatcagcctgtggctgtatggcgcccacagcgagagcaacagatccagaagatgcatcaccgatctggcccacttctacagcaagagcagccccatcgagaagctgctgaatctgaccctgggcaaccgcggcctgagaatacctcctgaaggcgtgctgagctgcctggaaagagtggactacgacaacgccttcggcagatacctggccaacacctacagcagctacctgttcttccacgtgatcaccctgtatatgaacgccctggactgggacgaagagaaaaccattctggccctgtggaaggacctgacctctgtggacatcggcaaggacctggtcaagttcaaggaccagatttggggcctgctgatcgtgaccaaggacttcgtgtactcccagagcagcaactgcctgttcgaccggaactacaccctgatgctgaaagacctgttcctgagccggttcaacagcctgatggtgctgctgtctcctccagagcctagatacagcgacgacctgatctcccagctgtgccagctgtatattgccggcgatcaggtgctgagcatgtgcggcaatagcggctacgaagtgatcaagatcctggaaccttacgtcgtgaacagcctggtgcagcgggccgagaagttcagaccactgattcacagcctgggcgacttccccgtgttcatcaaggacaaggtgtcccagctggaagagacattcggcccctgcgccagaagattcttcagagccctggaccagttcgacaacatccacgacctggtgttcgtgttcggctgctacagacactggggacacccctacatcgactacagaaagggcctgagcaagctgtacgaccaggttcacctgaagaagatgatcgacaagagctaccaagagtgcctggccagcgacctggccagacgtattctgagatggggcttcgacaagtacagcaagtggtatctggacagccggttcctggctcgggatcaccctctgactccctacatcaagacccagacctggcctcctaagcacatcgtggatctcgtgggcgacacctggcacaagctgcccatcacacagattttcgagatccccgagagcatggaccccagcgagattctggacgacaagtcccacagcttcacccggacaagactggcctcttggctgagcgagaatagaggcggacctgtgcctagcgagaaagtgatcatcaccgctctgtccaagcctccagtgaaccccagagagttcctgcggtctatcgatctcggcggcctgcctgatgaggacctgatcattggcctgaagcctaaagagcgcgagctgaagatcgagggcagattcttcgccctgatgagctggaacctgcggctgtactttgtgatcaccgagaaactgctggccaactacatcctgcctctgttcgacgccctgaccatgaccgacaatctgaacaaggtgttcaagaaactgatcgacagagtgaccggccagggactgctggactacagcagagtgacatacgccttccacctggattacgagaagtggaacaaccaccagcggctggaaagcaccgaggacgtgttctctgtgctggaccaggtgttcggcctgaagagagtgttcagcagaacccacgagttcttccagaaagcctggatctactacagcgaccgcagcgatctgatcggactgagagaggaccaaatctactgcctggacgccagcaatggccctacctgttggaatggacaggacggcggactggaaggactgagacagaaaggctggtccctggtgtccctgctgatgattgacagagagagccagatcagaaacacgcggaccaagattctggctcagggcgacaaccaggtgctgtgccctacctatatgctgagccctggcctgtctcaagaggggctgctgtacgaactggaacggatcagcagaaacgccctgtccatctatagagccgtggaagagggcgcctctaagctgggcctgatcatcaagaaagaagagacaatgtgcagctacgacttcctgatctacggcaagacccctctgttccggggcaacattctggtgcccgagtccaagagatgggccagagtgtcctgcgtgtccaacgaccagatcgtgaatctggccaatatcatgtccaccgtgtccaccaacgctctgacagtggcccagcacagccagtctctgatcaagcctatgcgggacttcctgctcatgtccgtgcaggccgtgttccactacctgctgttcagccctatcctgaagggcagagtgtataagatcctgagcgccgagggcgagagcttcctgcttgccatgagccggatcatctatctggaccctagcctcggcggcatcagcggcatgtctctgggcagatttcacatccggcagttcagcgaccctgtgtccgagggcctgtccttttggagagaaatctggctgtctagccaagagagctggattcacgccctgtgccaagaagccggcaatcccgatctgggcgagagaaccctggaatccttcaccagactgcttgaggaccccaccactctgaacatcagaggcggagcctctccaaccatcctgctcaaggacgccatccgcaaggccctgtatgacgaggtggacaaagtggaaaacagcgagttcagagaggccattctgctgagcaagacccaccgggacaacttcatcctgttcctcatctccgtggaacccctgtttcctagattcctgtccgagctgttctccagctccttcctgggcatccctgagtccatcatcggcctgatccagaactcccggaccatccgcagacagttcagaaagagcctgtctaagaccctggaagagtccttctacaacagcgaaatccacggcatctcccggatgacacagacccctcaaagagtcggcggcgtctggccttgttctagcgaaagagccgacctgctgagagagatcagctggggcagaaaggtcgtgggcaccacagtgcctcatccaagcgaaatgctgggcctcctgcctaagagcagcatcagctgtacctgtggcgctaccggcggaggcaatcctagagtgtctgtgtctgtgctgcccagcttcgaccagagcttcttcagcagaggacctctgaagggctacctgggctctagcaccagcatgagcacccagctgtttcacgcctgggaaaaagtgaccaatgtgcacgtggtcaagagagccctgtctctgaaagagagcatcaactggttcatcacgcgggacagcaatctggcacaggccctgattcggaacatcatgtccctgactggccctgactttccactggaagaggcccctgtgttcaagcgcacaggatctgccctgcacagattcaagagcgccagatactccgaaggcggctacagctccgtgtgtcccaatctgctgtcccacatctctgtgtccaccgacaccatgtccgatctgacccaggacggcaagaactacgatttcatgttccagcctctcatgctgtacgcccagacatggacaagcgagctggtgcagagagacacccggctgagagatagcaccttccactggcacctgaggtgcaacagatgcgtgcggcccatcgacgacgtgacactggaaacctctcagatattcgagttcccagacgtgtccaagcggatcagccgaatggtgtctggcgccgtgcctcacttccaaagactgcccgacatcagactgcggccaggcgattttgagagcctgagcggcagagagaagtcccaccacatcggatctgcacagggcctgctctactctatcctggtggccatccacgattccggctacaacgacggcaccatctttcccgtgaacatctacggaaaagtgtccccacgggactacctgagaggactggctagaggggtgctgatcggcagcagcatctgctttctgaccagaatgaccaacatcaacatcaataggcccctggaactggtgtccggcgtgatcagctatatcctgctgcggctggacaatcaccccagcctgtatatcatgctgagggaacccagcctgcggggcgagatttttagcatccctcagaagatccctgccgcctatcctaccaccatgaaggaaggcaatcggagcatcctgtgctacctccagcatgtgctgagatacgagcgggaaatcattaccgcctctccagagaacgattggctgtggatctttagcgacttccgcagcgccaagatgacctacctgagcctgatcacctaccagagccatctgctgctccagagagtggaacggaacctgtccaagagcatgagggacaacctgaggcagctgtcctctctgatgagacaggtgctcggaggacacggcgaggatacactggaatctgacgacaatatccagcggctcctgaaagacagcctgagaagaaccagatgggttgaccaagaagtgcgccacgccgccagaacaatgaccggcgattacagccccaacaagaaagtgtccagaaaagtgggctgctccgagtgggtctgctctgctcagcaagttgccgtgtctaccagcgccaatcctgcaccagtttccgagctggacattagagccctgagcaaacggttccagaatcctctgatctctggcctgagagtggtgcagtgggctacaggcgcccactacaagctgaagcccatcctggacgatctgaacgtgttccctagcctgtgtctggtcgtcggagatggatctggcggaatcagcagagccgtgctgaatatgttccccgacgccaagctggtgttcaatagcctgctggaagtgaacgatctgatggccagcggcacacaccctctgccaccaagcgcaattatgagaggcggcaacgacatcgtgtccagagtgatcgacctggactccatctgggagaagccctccgacctgagaaacctggccacctggaagtactttcagagcgtgcagaaacaagtgaacatgagctacgacctcatcatctgcgacgccgaagtgaccgacattgcctccatcaacagaatcacactgctgatgtccgacttcgctctgagcatcgacggccctctgtatctggtgtttaagacctacggcacaatgctcgtgaaccctaactacaaggccatccagcacctcagcagggcctttccaagcgtgaccggcttcatcacccaagtgacctccagcttcagcagcgagctgtatctgcggttcagcaagcggggcaagttcttcagggacgccgagtacctgaccagcagcacactgagagaaatgagtctggtgctgttcaactgctctagccccaagagcgagatgcagagagctagaagcctgaactaccaggacctcgtgcggggcttccccgaagagatcatctctaacccctacaacgagatgatcattaccctgatcgactccgacgtcgagagctttctggtgcacaagatggtggacgacctggaacttcagaggggcacactgtccaaggtggccattatcattgccattatgatcgtgttctccaaccgggttttcaatgtctccaagccactgacagaccccagcttctaccctcctagcgacccaaagatcctgcggcacttcaacatctgttgtagcaccatgatgtacctgagcaccgcactgggagatgtgccatcctttgccagactgcacgacctgtataacagacccatcacctactactttcggaagcaagtgatccgcggcaacgtgtacctgtcctggtcttggagcaacgacaccagcgtgttcaaaagagtggcctgcaacagctctctgtccctgagcagccactggatcagactgatctacaagatcgtcaagaccacacggctcgtgggcagcatcaaggatctgagtagagaggtggaaaggcatctgcatcggtacaatcggtggatcacacttgaggacatccggtccagatcatccctactagactacagttgcctgtga

SEQ ID NO: 4015 - DNA, 894 bp, Artificial Sequence
  Description of Artificial Sequence: Synthetic polynucleotide
atgagcaagatctttgtcaatcctagtgctatcagagccggcctggctgatcttgagatggccgaggaaaccgtggacctgatcaaccggaacatcgaggacaatcaggcccatctgcagggcgagcctatcgaggttgacaatctgcccgaggacatgggcagactgcacctggatgatggcaagagccctaaccacggcgagatcgccaaagttggcgagggcaagtaccgcgaggacttccagatggacgagggcgaagatcccagcttcctgttccagtcctacctggaaaacgtgggcgtgcagatcgtgcggcagatgagaagcggcgagcggttcctgaagatttggagccagaccgtggaagagatcatcagctacgtggccgtgaacttccccaatcctccaggcaagagcagcgaggacaagagcacacagaccaccggcagagagctgaagaaagagacaacccctacacctagccagagagagagccagagcagcaaggccagaatggccgctcagattgcctctggacctccagctcttgagtggagcgccaccaacgaagaggacgacctgtctgtggaagccgagattgcccaccagatcgccgagagcttcagcaagaagtacaagttccccagcagaagcagcggcatcctgctgtataacttcgagcagctgaagatgaacctggacgacatcgtgaaagaggccaagaacgtccccggcgtgacaagactggcccacgatggatctaagctgcccctgagatgtgtgctcggatgggttgccctggccaatagcaagaaattccagctgctggtggaaagcgacaagctgtccaagatcatgcaggatgacttgaatcgctatacatcttgctaa

SEQ ID NO: 4016 - DNA, 1575 bp, Artificial Sequence
  Description of Artificial Sequence: Synthetic polynucleotide
atggttcctcaggctctgctgttcgtgcccctgctggtgttccctctgtgcttcggcaagttccccatctacacaatccccgacaagctcggcccttggagccctatcgatattcaccacctgagctgccccaacaacctggtggtggaagatgagggctgcaccaacctgagcggcttcagctacatggaactgaaagtgggctacatcctggccatcaaagtgaacggcttcacctgtaccggcgtcgtgacagaggccgagacatacaccaacttcgtgggctacgtgaccaccaccttcaagcggaagcacttcagacccacacctgacgcctgtagagccgcctacaactggaaaatggccggcgatcccagatacgaggaaagcctgcacaacccctatcctgactacagatggctgagaaccgtgaaaaccaccaaagagagcctggtcatcatcagccccagcgtggccgatctggacccctatgatagatccctgcacagcagagtgttccccagcggcaaatgttctggcgtggccgtgtctagcacctactgctccaccaaccacgactacaccatctggatgcccgagaatcccagactgggcatgagctgcgacatcttcaccaacagccggggcaagagagccagcaagggctctgagacatgcggcttcgtggacgagaggggcctgtataagtctctgaagggcgcctgcaagctgaagctgtgcggagttctgggcctgagactgatggatggcacctgggtgtccatgcagaccagcaacgagacaaagtggtgccctcctgacaagctggtcaacctgcacgacttcagaagcgacgagatcgagcatctggtggtcgaggaactcgtgcggaagagggaagaatgcctggacgccctggaatccattatgaccaccaagagcgtgtccttccggcggctgtctcacctgagaaaactggtgcccggctttggcaaggcttacacaatcttcaacaagaccctgatggaagccgacgctcactacaagtctgtgcggacctggaacgagatcctgccttccaagggctgcctgagagttggcggaagatgtcaccctcacgtgaacggcgtgttcttcaacggcatcatcctgggacctgacggcaacgtgctgatccctgagatgcagtctagcctgctccagcaacacatggaattgctggaaagcagcgtgatccctctggtgcaccctctggccgatcctagcaccgtgtttaaggatggcgacgaggccgaggacttcgtggaagtgcatctgcccgacgtgcacaatcaggtgtcaggcgttgacctgggcctgcctaactggggcaaatacgtgctgctttctgccggcgctctgacagccctgatgctgatcatcttcctgatgacctgctgtcggagagtgaacagaagcgagcccacacagcacaacctgagaggcacaggcagagaagtgtccgtgacacctcagagcggcaagatcatcagcagctgggagagccacaagagcggcggagaaacaagactgtaa

SEQ ID NO: 4017 - DNA, 447 bp, Artificial Sequence
  Description of Artificial Sequence: Synthetic polynucleotide
aacatccctcaaaagactcaaggaaaggctccagtggcgcaatcggttagcgcgcggtacttataagacagtgcacctgtgagcaatgccgaggttgtgagttcaagcctcacctggagcagcgtgtagggtaaccatgaacgttttagagctagaaatagcaagttaaaataaggctagtccgttatcaacttgaaaaagtggcaccgagtcggtgcttttttcacacacacaaggctcgttggtctaggggtatgattctcgcttagggtgcgagaggtcccgggttcaaatcccggacgagcccggaacacaaagcatagactgcgttttagagctagccgcgaggaaggaggtctgaggaggtcactgcggctagcaagttaaaataaggctagtccgttatcaacttgaaaaagtggcaccgagtcggtgctttttaattaa

SEQ ID NO: 4018 - DNA, 460 bp, Artificial Sequence
  Description of Artificial Sequence: Synthetic polynucleotide
aacatccctcaaaagactcaaggaaaggctccagtggcgcaatcggttagcgcgcggtacttataagacagtgcacctgtgagcaatgccgaggttgtgagttcaagcctcacctggagcagcgtgtagggtaaccatgaacgttttagagctagaaatagcaagttaaaataaggctagtccgttatcaacttgaaaaagtggcaccgagtcggtgcttttttcacacacacaaggctccatagctcaggggttagagcactggtcttgtaaaccaggggtcgcgagttcaattctcgctggggcttggaacacaaagcatagactgcgttttagagctagccgcgaggaaggaggtctgaggaggtcactgcggctagcaagttaaaataaggctagtccgttatcaacttgaaaaagtggcaccgagtcggtgctttttaattaaccgagaaaaaaa

SEQ ID NO: 4019 - DNA, 460 bp, Artificial Sequence
  Description of Artificial Sequence: Synthetic polynucleotide
aacatccctcaaaagactcaaggaaaggctccagtggcgcaatcggttagcgcgcggtacttataagacagtgcacctgtgagcaatgccgaggttgtgagttcaagcctcacctggagcagcgtgtagggtaaccatgaacgttttagagctagaaatagcaagttaaaataaggctagtccgttatcaacttgaaaaagtggcaccgagtcggtgcttttttcacacacacaagtttccgtagtgtagtggttatcacgttcgcctcacacgcgaaaggtccccggttcgaaaccgggcggaaacaggaacacaaagcatagactgcgttttagagctagccgcgaggaaggaggtctgaggaggtcactgcggctagcaagttaaaataaggctagtccgttatcaacttgaaaaagtggcaccgagtcggtgctttttaattaaccgagaaaaaaa

SEQ ID NO: 4020 - DNA, 288 bp, Artificial Sequence
  Description of Artificial Sequence: Synthetic polynucleotide
ggctcgttggtctaggggtatgattctcgcttagggtgcgagaggtcccgggttcaaatcccggacgagcccgaacacaaagcatagactgcgtcttagagctaggcccgaggaaggaggtctgaggaggtcactgggcctagcaagttaagataaggctagtccgttatcaacttgaaaaagtggcaccgagtcggtgcttaaccagtttgtgtcggctcgttggtctaggggtatgattctcgcttagggtgcgagaggtcccgggttcaaatcccggacgagccc

SEQ ID NO: 4021 - DNA, 5979 bp, Artificial Sequence
  Description of Artificial Sequence: Synthetic polynucleotide
atgtccgaagtcgagttttcccatgagtactggatgagacacgcattgactctcgcaaagagggctcgagatgaacgcgaggtgcccgtgggggcagtactcgtgctcaacaatcgcgtaatcggcgaaggttggaatagggcaatcggactccacgaccccactgcacatgcggaaatcatggcccttcgacagggagggcttgtgatgcagaattatcgacttatcgatgcgacgctgtacgtcacgtttgaaccttgcgtaatgtgcgcgggagctatgattcactcccgcattggacgagttgtattcggtgttcgcaacgccaagacgggtgccgcaggttcactgatggacgtgctgcattacccaggcatgaaccaccgggtagaaatcacagaaggcatattggcggacgaatgtgcggcgctgttgtgttacttttttcgcatgcccaggcgtgtctttaacgcccagaaaaaagcacaatcctctactgactctggtggttcttctggtggttctagcggcagcgagactcccgggacctcagagtccgccacacccgaaagttctggtggttcttctggtggttctgacaagaagtacagcatcggcctggccatcggcaccaactctgtgggctgggccgtgatcaccgacgagtacaaggtgcccagcaagaaattcaaggtgctgggcaacaccgaccggcacagcatcaagaagaacctgatcggagccctgctgttcgacagcggcgaaacagccgaggccacccggctgaagagaaccgccagaagaagatacaccagacggaagaaccggatctgctatctgcaagagatcttcagcaacgagatggccaaggtggacgacagcttcttccacagactggaagagtccttcctggtggaagaggataagaagcacgagcggcaccccatcttcggcaacatcgtggacgaggtggcctaccacgagaagtaccccaccatctaccacctgagaaagaaactggtggacagcaccgacaaggccgacctgcggctgatctatctggccctggcccacatgatcaagttccggggccacttcctgatcgagggcgacctgaaccccgacaacagcgacgtggacaagctgttcatccagctggtgcagacctacaaccagctgttcgaggaaaaccccatcaacgccagcggcgtggacgccaaggccatcctgtctgccagactgagcaagagcagacggctggaaaatctgatcgcccagctgcccggcgagaagaagaatggcctgttcggaaacctgattgccctgagcctgggcctgacccccaacttcaagagcaacttcgacctggccgaggatgccaaactgcagctgagcaaggacacctacgacgacgacctggacaacctgctggcccagatcggcgaccagtacgccgacctgtttctggccgccaagaacctgtccgacgccatcctgctgagcgacatcctgagagtgaacaccgagatcaccaaggcccccctgagcgcctctatgatcaagagatacgacgagcaccaccaggacctgaccctgctgaaagctctcgtgcggcagcagctgcctgagaagtacaaagagattttcttcgaccagagcaagaacggctacgccggctacattgacggcggagccagccaggaagagttctacaagttcatcaagcccatcctggaaaagatggacggcaccgaggaactgctcgtgaagctgaacagagaggacctgctgcggaagcagcggaccttcgacaacggcagcatcccccaccagatccacctgggagagctgcacgccattctgcggcggcaggaagatttttacccattcctgaaggacaaccgggaaaagatcgagaagatcctgaccttccgcatcccctactacgtgggccctctggccaggggaaacagcagattcgcctggatgaccagaaagagcgaggaaaccatcaccccctggaacttcgaggaagtggtggacaagggcgcttccgcccagagcttcatcgagcggatgaccaacttcgataagaacctgcccaacgagaaggtgctgcccaagcacagcctgctgtacgagtacttcaccgtgtataacgagctgaccaaagtgaaatacgtgaccgagggaatgagaaagcccgccttcctgagcggcgagcagaaaaaggccatcgtggacctgctgttcaagaccaaccggaaagtgaccgtgaagcagctgaaagaggactacttcaagaaaatcgagtgcttcgactccgtggaaatctccggcgtggaagatcggttcaacgcctccctgggcacataccacgatctgctgaaaattatcaaggacaaggacttcctggacaatgaggaaaacgaggacattctggaagatatcgtgctgaccctgacactgtttgaggacagagagatgatcgaggaacggctgaaaacctatgcccacctgttcgacgacaaagtgatgaagcagctgaagcggcggagatacaccggctggggcaggctgagccggaagctgatcaacggcatccgggacaagcagtccggcaagacaatcctggatttcctgaagtccgacggcttcgccaacagaaacttcatgcagctgatccacgacgacagcctgacctttaaagaggacatccagaaagcccaggtgtccggccagggcgatagcctgcacgagcacattgccaatctggccggcagccccgccattaagaagggcatcctgcagacagtgaaggtggtggacgagctcgtgaaagtgatgggccggcacaagcccgagaacatcgtgatcgaaatggccagagagaaccagaccacccagaagggacagaagaacagccgcgagagaatgaagcggatcgaagagggcatcaaagagctgggcagccagatcctgaaagaacaccccgtggaaaacacccagctgcagaacgagaagctgtacctgtactacctgcagaatgggcgggatatgtacgtggaccaggaactggacatcaaccggctgtccgactacgatgtggaccatatcgtgcctcagagctttctgaaggacgactccatcgacaacaaggtgctgaccagaagcgacaagaaccggggcaagagcgacaacgtgccctccgaagaggtcgtgaagaagatgaagaactactggcggcagctgctgaacgccaagctgattacccagagaaagttcgacaatctgaccaaggccgagagaggcggcctgagcgaactggataaggccggcttcatcaagagacagctggtggaaacccggcagatcacaaagcacgtggcacagatcctggactcccggatgaacactaagtacgacgagaatgacaagctgatccgggaagtgaaagtgatcaccctgaagtccaagctggtgtccgatttccggaaggatttccagttttacaaagtgcgcgagatcaacaactaccaccacgcccacgacgcctacctgaacgccgtcgtgggaaccgccctgatcaaaaagtaccctaagctggaaagcgagttcgtgtacggcgactacaaggtgtacgacgtgcggaagatgatcgccaagagcgagcaggaaatcggcaaggctaccgccaagtacttcttctacagcaacatcatgaactttttcaagaccgagattaccctggccaacggcgagatccggaagcggcctctgatcgagacaaacggcgaaaccggggagatcgtgtgggataagggccgggattttgccaccgtgcggaaagtgctgagcatgccccaagtgaatatcgtgaaaaagaccgaggtgcagacaggcggcttcagcaaagagtctatcctgcccaagaggaacagcgataagctgatcgccagaaagaaggactgggaccctaagaagtacggcggcttcgacagccccaccgtggcctattctgtgctggtggtggccaaagtggaaaagggcaagtccaagaaactgaagagtgtgaaagagctgctggggatcaccatcatggaaagaagcagcttcgagaagaatcccatcgactttctggaagccaagggctacaaagaagtgaaaaaggacctgatcatcaagctgcctaagtactccctgttcgagctggaaaacggccggaagagaatgctggcctctgccggcgaactgcagaagggaaacgaactggccctgccctccaaatatgtgaacttcctgtacctggccagccactatgagaagctgaagggctcccccgaggataatgagcagaaacagctgtttgtggaacagcacaagcactacctggacgagatcatcgagcagatcagcgagttctccaagagagtgatcctggccgacgctaatctggacaaagtgctgtccgcctacaacaagcaccgggataagcccatcagagagcaggccgagaatatcatccacctgtttaccctgaccaatctgggagcccctgccgccttcaagtactttgacaccaccatcgaccggaagaggtacaccagcaccaaagaggtgctggacgccaccctgatccaccagagcatcaccggcctgtacgagacacggatcgacctgtctcagctgggaggtgacgagggagctgataagcgcaccgccgatggttccgagttcgaaagccccaagaagaagaggaaagtcgaattcggcagtggagagggcagagggtccctgctaacatgcggtgacgtcgaggagaatcctggcccaatggtgagcaagggcgaggagctgttcaccggggtggtgcccatcctggtcgagctggacggcgacgtaaacggccacaagttcagcgtgtccggcgagggcgagggcgatgccacctacggcaagctgaccctgaagttcatctgcaccaccggcaagctgcccgtgccctggcccaccctcgtgaccaccctgacctacggcgtgcagtgcttcagccgctaccccgaccacatgaagcagcacgacttcttcaagtccgccatgcccgaaggctacgtccaggagcgcaccatcttcttcaaggacgacggcaactacaagacccgcgccgaggtgaagttcgagggcgacaccctggtgaaccgcatcgagctgaagggcatcgacttcaaggaggacggcaacatcctggggcacaagctggagtacaactacaacagccacaacgtctatatcatggccgacaagcagaagaacggcatcaaggtgaacttcaagatccgccacaacatcgaggacggcagcgtgcagctcgccgaccactaccagcagaacacccccatcggcgacggccccgtgctgctgcccgacaaccactacctgagcacccagtccgccctgagcaaagaccccaacgagaagcgcgatcacatggtcctgctggagttcgtgaccgccgccgggatcactctcggcatggacgagctgtacaagtaagaagttgaataacaaaatgccggaaatctacggattgtgtatatccatcatgaaaaaaactaacacccctcctttcgaaccatcccaaacgctccagtggcgcaatcggttagcgcgcggtacttataagacagtgcacctgtgagcaatgccgaggttgtgagttcaagcctcacctggagcaggaacacaaagcatagactgcgttttagagctagaaatagcaagttaaaataaggctagtccgttatcaacttgaaaaagtggcaccgagtcggtgcttcacacacacaagctccagtggcgcaatcggttagcgcgcggtacttataagacagtgcagccgcgaggaaggaggtctgaggaggtcactgcggccctgtgagcaatgccgaggttgtgagttcaagcctcacctggagcata

SEQ ID NO: 4022 - DNA, 334 bp, Artificial Sequence
  Description of Artificial Sequence: Synthetic polynucleotide
gctccagtggcgcaatcggttagcgcgcggtacttataagacagtgcacctgtgagcaatgccgaggttgtgagttcaagcctcacctggagcaggaacacaaagcatagactgcgttttagagctagaaatagcaagttaaaataaggctagtccgttatcaacttgaaaaagtggcaccgagtcggtgcttcacacacacaagctccagtggcgcaatcggttagcgcgcggtacttataagacagtgcagccgcgaggaaggaggtctgaggaggtcactgcggccctgtgagcaatgccgaggttgtgagttcaagcctcacctggagca

SEQ ID NO: 4023 - DNA, 609 bp, Artificial Sequence
  Description of Artificial Sequence: Synthetic polynucleotide
atgaacctgctgcggaagatcgtgaagaatcggcgcgacgaggacacccagaagtctagccctgcttctgcccctctggacgacgatgatctgtggctgcctcctccagagtacgtgcccctgaaagagctgaccggcaaaaagaacatgcggaatttctgcatcaacggccgcgtgaaagtgtgcagccccaacggctacagcttcagaatcctgcggcacatcctgaagtccttcgacgaaatctacagcggcaaccaccggatgatcggcctggtcaaggttgtgattggactggccctgagcggctctcctgttcctgaaggcctgaactgggtctacaagctgcggcggacattcatttttcagtgggccgacagcagaggccctctggaaggcgaggaactggaatactcccaagagatcacctgggacgacgacaccgagtttgtgggcctgcagatcagagtgatcgccaagcagtgccacatccagggcagagtgtggtgcatcaacatgaaccccagagcctgccagctttggagcgacatgtctctgcagacccagcggagcgaagaggacaaggattcctctctgcttctagaataa

SEQ ID NO: 4024 - DNA, 411 bp, Artificial Sequence
  Description of Artificial Sequence: Synthetic polynucleotide
gtacaagtaagaagttgaataacaaaatgccggaaatctacggattgtgtatatccatcatgaaaaaaactaacacccctcctttcgaaccatcccaaacggctcgttggtctaggggtatgattctcgcttagggtgcgagaggtcccgggttcaaatcccggacgagcccggaacacaaagcatagactgcgttttagagctagaaatagcaagttaaaataaggctagtccgttatcaacttgaaaaagtggcaccgagtcggtgcttttcgaggaaggaggtctgaggaggtcactgcgaaccagtttgtgtcggctcgttggtctaggggtatgattctcgcttagggtgcgagaggtcccgggttcaaatcccggacgagccctctagaagtgctgggtcatcta

SEQ ID NO: 4025 - DNA, 436 bp, Artificial Sequence
  Description of Artificial Sequence: Synthetic polynucleotide
gtacaagtaagaagttgaataacaaaatgccggaaatctacggattgtgtatatccatcatgaaaaaaactaacacccctcctttcgaaccatcccaaacgctccagtggcgcaatcggttagcgcgcggtacttataagacagtgcacctgtgagcaatgccgaggttgtgagttcaagcctcacctggagcaggaacacaaagcatagactgcgttttagagctagaaatagcaagttaaaataaggctagtccgttatcaacttgaaaaagtggcaccgagtcggtgcttcacacacacaagctccagtggcgcaatcggttagcgcgcggtacttataagacagtgcagccgcgaggaaggaggtctgaggaggtcactgcggccctgtgagcaatgccgaggttgtgagttcaagcctcacctggagcata

SEQ ID NO: 4026 - DNA, 340 bp, Artificial Sequence
  Description of Artificial Sequence: Synthetic polynucleotide
gtacaagtaagaagttgaataacaaaatgccggaaatctacggattgtgtatatccatcatgaaaaaaactaacacccctcctttcgaaccatcccaaacgctccagtggcgcaatcggttagcgcgcggtacttataagacagtgcagaacacaaagcatagactgcgttttagagctaccgaaaggtagcaagttaaaataaggctagtccgttatcaacttgaaaaagtggcaccgagtcggtgcttcacacacacacacgaggaaggaggtctgaggaggtcactgcgcctgtgagcaatgccgaggttgtgagttcaagcctcacctggagcata

SEQ ID NO: 4027 - DNA, 411 bp, Artificial Sequence
  Description of Artificial Sequence: Synthetic polynucleotide
gtacaagtaagaagttgaataacaaaatgccggaaatctacggattgtgtatatccatcatgaaaaaaactaacacccctcctttcgaaccatcccaaacgctccagtggcgcaatcggttagcgcgcggtacttataagacagtgcaggaacacaaagcatagactgcgttttagagctaccgaaaggtagcaagttaaaacaaggctagtccgttatcaacttgaaaaagtggcaccgagtcggtgctttggcccgaggaaggaggtctgaggaggtcactgggccaaaacaacaacccaaccaacaaaccaacaccaaacaacaaaccaaaccccaacaaacaaccaccaacccaaacaacctgtgagcaatgccgaggttgtgagttcaagcctcacctggagcata

SEQ ID NO: 4028 - DNA, 415 bp, Artificial Sequence
  Description of Artificial Sequence: Synthetic polynucleotide
gtacaagtaagaagttgaataacaaaatgccggaaatctacggattgtgtatatccatcatgaaaaaaactaacacccctcctttcgaaccatcccaaacgctccagtggcgcaatcggttagcgcgcggtacttataagacagtgcaggagcccgaacacaaagcatagactgcgttttagagctaggcccgaggaaggaggtctgaggaggtcactgggcctagcaagttaaaataaggctagtccgttatcaacttgaaaaagtggcaccgagtcggtgcttaaaacaacaacccaaccaacaaaccaacaccaaacaacaaaccaaaccccaacaaacaaccaccaacccaaacaagggctcccctgtgagcaatgccgaggttgtgagttcaagcctcacctggagcata

SEQ ID NO: 4029 - DNA, 419 bp, Artificial Sequence
  Description of Artificial Sequence: Synthetic polynucleotide
gtacaagtaagaagttgaataacaaaatgccggaaatctacggattgtgtatatccatcatgaaaaaaactaacacccctcctttcgaaccatcccaaacgggctcccctgtgagcaatgccgaggttgtgagttcaagcctcacctggagcagaaagctccagtggcgcaatcggttagcgcgcggtacttataagacagtgcaggagcccgaacacaaagcatagactgcgttttagagctaggcccgaggaaggaggtctgaggaggtcactgggcctagcaagttaaaataaggctagtccgttatcaacttgaaaaagtggcaccgagtcggtgcttaaaacaacaacccaaccaacaaaccaacaccaaacaacaaaccaaaccccaacaaacaaccaccaacccaaacaata

SEQ ID NO: 4030 - DNA, 438 bp, Artificial Sequence
  Description of Artificial Sequence: Synthetic polynucleotide
aacatccctcaaaagactcaaggaaagggctcgttggtctaggggtatgattctcgcttagggtgcgagaggtcccgggttcaaatcccggacgagcccgcgtgtagggtaaccatgaacgttttagagctagaaatagcaagttaaaataaggctagtccgttatcaacttgaaaaagtggcaccgagtcggtgcttttttcacacacacaaggctccatagctcaggggttagagcactggtcttgtaaaccaggggtcgcgagttcaattctcgctggggcttggaacacaaagcatagactgcgttttagagctagccgcgaggaaggaggtctgaggaggtcactgcggctagcaagttaaaataaggctagtccgttatcaacttgaaaaagtggcaccgagtcggtgctttttaattaaccgagaaaaaaa

SEQ ID NO: 4031 - DNA, 439 bp, Artificial Sequence
  Description of Artificial Sequence: Synthetic polynucleotide
aacatccctcaaaagactcaaggaaaggtttccgtagtgtagtggttatcacgttcgcctcacacgcgaaaggtccccggttcgaaaccgggcggaaacagcgtgtagggtaaccatgaacgttttagagctagaaatagcaagttaaaataaggctagtccgttatcaacttgaaaaagtggcaccgagtcggtgcttttttcacacacacaagcccggctagctcagtcggtagagcatgagactcttaatctcagggtcgtgggttcgagccccacgttgggcgggaacacaaagcatagactgcgttttagagctagccgcgaggaaggaggtctgaggaggtcactgcggctagcaagttaaaataaggctagtccgttatcaacttgaaaaagtggcaccgagtcggtgctttttaattaaccgagaaaaaaa

SEQ ID NO: 4032 - DNA, 520 bp, Artificial Sequence
  Description of Artificial Sequence: Synthetic polynucleotide
aacatccctcaaaagactcaaggaaagtcctcgttagtatagtggtgagtatccccgcctgtcacgcgggagaccggggttcgattccccgacggggaggcgtgtagggtaaccatgaacgttttagagctagaaatagcaagttaaaataaggctagtccgttatcaacttgaaaaagtggcaccgagtcggtgcttttttcacacacacaagcgttggtggtatagtggtgagcatagctgccttccaagcagttgacccgggttcgattcccggccaacgcaggaacacaaagcatagactgcgttttagagctagccgcgaggaaggaggtctgaggaggtcactgcggctagcaagttaaaataaggctagtccgttatcaacttgaaaaagtggcaccgagtcggtgctttcacacacacaatccttggtggtctagtggttaggattcggcgctctcaccgccgcggcccgggttcgattcccggtcagggaattaattaaccgagaaaaaaa

SEQ ID NO: 4033 - DNA, 386 bp, Artificial Sequence
  Description of Artificial Sequence: Synthetic polynucleotide
aacatccctcaaaagactcaaggaaaggctccagtggcgcaatcggttagcgcgcggtacttataagacagtgcacctgtgagcaatgccgaggttgtgagttcaagcctcacctggagcagcgtgtagggtaaccatgaacgttttagagctagaaatagcaagttaaaataaggctagtccgttatcaacttgaaaaagtggcaccgagtcggtgcttttttcacacacacaagctccagtggcgcaatcggttagcgcgcggtacttataagacagtgcagccgcgaggaaggaggtctgaggaggtcactgcggccctgtgagcaatgccgaggttgtgagttcaagcctcacctggagcattaattaatccgagaaaaaaa

SEQ ID NO: 4034 - DNA, 241 bp, Artificial Sequence
  Description of Artificial Sequence: Synthetic polynucleotide
aacatccctcaaaagactcaaggaaaggctccagtggcgcaatcggttagcgcgcggtacttataagacagtgcacctgtgagcaatgccgaggttgtgagttcaagcctcacctggagcagcgtgtagggtaaccatgaacgttttagagctagaaatagcaagttaaaataaggctagtccgttatcaacttgaaaaagtggcaccgagtcggtgcttttttaattaacgagaaaaaaa

SEQ ID NO: 4035 - DNA, 511 bp, Artificial Sequence
  Description of Artificial Sequence: Synthetic polynucleotide
aacatccctcaaaagactcaaggaaaggctccagtggcgcaatcggttagcgcgcggtacttataagacagtgcacctgtgagcaatgccgaggttgtgagttcaagcctcacctggagcagcgtgtagggtaaccatgaacgttttagagctagaaatagcaagttaaaataaggctagtccgttatcaacttgaaaaagtggcaccgagtcggtgcttttttcacacacacaagctccagtggcgcaatcggttagcgcgcggtacttataagacagtgcagccgcgaggaaggaggtctgaggaggtcactgcggccctgtgagcaatgccgaggttgtgagttcaagcctcacctggagcaggaacacaaagcatagactgcgttttagagctagccgcgaggaaggaggtctgaggaggtcactgcggctagcaagttaaaataaggctagtccgttatcaacttgaaaaagtggcaccgagtcggtgctttttccgagaaaaaaa

SEQ ID NO: 4036 - DNA, 459 bp, Artificial Sequence
  Description of Artificial Sequence: Synthetic polynucleotide
aacatccctcaaaagactcaaggaaaggctccagtggcgcaatcggttagcgcgcggtacttataagacagtgcacctgtgagcaatgccgaggttgtgagttcaagcctcacctggagcagcgtgtagggtaaccatgaacgttttagagctagaaatagcaagttaaaataaggctagtccgttatcaacttgaaaaagtggcaccgagtcggtgcttttttcacacacacaagcgttggtggtatagtggtgagcatagctgccttccaagcagttgacccgggttcgattcccggccaacgcaggaacacaaagcatagactgcgttttagagctagccgcgaggaaggaggtctgaggaggtcactgcggctagcaagttaaaataaggctagtccgttatcaacttgaaaaagtggcaccgagtcggtgctttttaattaaccgagaaaaaaa

SEQ ID NO: 4037 - DNA, 460 bp, Artificial Sequence
  Description of Artificial Sequence: Synthetic polynucleotide
aacatccctcaaaagactcaaggaaaggctccagtggcgcaatcggttagcgcgcggtacttataagacagtgcacctgtgagcaatgccgaggttgtgagttcaagcctcacctggagcagcgtgtagggtaaccatgaacgttttagagctagaaatagcaagttaaaataaggctagtccgttatcaacttgaaaaagtggcaccgagtcggtgcttttttcacacacacaagcccggctagctcagtcggtagagcatgagactcttaatctcagggtcgtgggttcgagccccacgttgggcgggaacacaaagcatagactgcgttttagagctagccgcgaggaaggaggtctgaggaggtcactgcggctagcaagttaaaataaggctagtccgttatcaacttgaaaaagtggcaccgagtcggtgctttttaattaaccgagaaaaaaa

SEQ ID NO: 4038 - DNA, 469 bp, Artificial Sequence
  Description of Artificial Sequence: Synthetic polynucleotide
aacatccctcaaaagactcaaggaaaggctccagtggcgcaatcggttagcgcgcggtacttataagacagtgcacctgtgagcaatgccgaggttgtgagttcaagcctcacctggagcagcgtgtagggtaaccatgaacgttttagagctagaaatagcaagttaaaataaggctagtccgttatcaacttgaaaaagtggcaccgagtcggtgcttttttcacacacacaaggtagcgtggccgagcggtctaaggcgctggattaaggctccagtctcttcgggggcgtgggttcgaatcccaccgctgccaggaacacaaagcatagactgcgttttagagctagccgcgaggaaggaggtctgaggaggtcactgcggctagcaagttaaaataaggctagtccgttatcaacttgaaaaagtggcaccgagtcggtgctttttaattaaccgagaaaaaaa

SEQ ID NO: 4039 - protein, 21 aa, Artificial Sequence
  Description of Artificial Sequence: Synthetic peptide
  SITE (1)..(21): This sequence may encompass 1, 3 or 7 "Gly Ser" repeating units
GGSGGSGGSGGSGGSGGSGGS
